(19) United States
(12) Patent Application Publication
(10) Pub. No.: US 2019/0292543 A1
(43) Pub. Date: Sep. 26, 2019

(54) COMPOSITIONS AND METHODS TO CONTROL INSECT PESTS

(71) Applicant: PIONEER HI-BRED INTERNATIONAL, INC., Johnston, IA (US)

(72) Inventors: VIRGINIA CRANE, DES MOINES, IA (US); JOHN LINDSEY FLEXNER, PRINEVILLE, OR (US); XU HU, JOHNSTON, IA (US); ADANE KASSA, JOHNSTON, IA (US); ALBERT L. LU, WEST DES MOINES, IA (US); XIPING NIU, JOHNSTON, IA (US); ZAIQI PAN, HOCKESSIN, DE (US); AMIT SETHI, JOHNSTON, IA (US); GUSUI WU, FOSTER CITY, CA (US)

(73) Assignee: PIONEER HI-BRED INTERNATIONAL, INC., JOHNSTON, IA (US)

(21) Appl. No.: 16/462,654

(22) PCT Filed: Dec. 13, 2017
(86) PCT No.: PCT/US17/66011

§ 371 Date: May 21, 2019

Related U.S. Application Data
(60) Provisional application No. 62/550,133, filed on Aug. 25, 2017.
(60) Provisional application No. 62/434,939, filed on Dec. 15, 2016.

(51) Int. Cl. C12N 15/113; C07K 14/435; C12N 15/82

(52) U.S. Cl. CPC C12N 15/113; C12N 2310/141; C12N 15/8286; C07K 14/43563

(57) ABSTRACT

The present invention relates generally to methods of molecular biology and gene silencing to control pests.

### CROSS REFERENCE TO RELATED APPLICATIONS

[0001] This application claims priority to U.S. Provisional Application No. 62/434,939, filed Dec. 15, 2016 and U.S. Provisional Application No. 62/550,133, filed Aug. 25, 2017, which are hereby incorporated herein in its entirety by reference.

### REFERENCE TO SEQUENCE LISTING SUBMITTED ELECTRONICALLY

[0002] A sequence listing having the file name “7244WOPCT_SequenceList.txt” created on Oct. 10, 2017 and having a size of 799 kilobytes is filed in computer readable form concurrently with the specification. The sequence listing is part of the specification and is herein incorporated by reference in its entirety.

### FIELD

[0003] The present disclosure relates generally to methods of molecular biology and gene silencing to control pests.

### BACKGROUND

[0004] Plant insect pests are a serious problem in agriculture. They destroy millions of acres of staple crops such as corn, soybeans, peas, and cotton. Yearly, plant insect pests cause over $100 billion dollars in crop damage in the U.S. alone. In an ongoing seasonal battle, farmers must apply billions of gallons of synthetic pesticides to combat these pests. Other methods employed in the past delivered insecticidal activity by microorganisms or genes derived from microorganisms expressed in transgenic plants. For example, certain species of microorganisms of the genus Bacillus are known to possess pesticidal activity against a broad range of insect pests including Lepidoptera, Diptera, Coleoptera, Hemiptera, and others. In fact, microbial pesticides, particularly those obtained from Bacillus strains, have played an important role in agriculture as alternatives to chemical pest control. Agricultural scientists have developed crop plants with enhanced insect resistance by genetically engineering crop plants to produce insecticidal proteins from Bacillus. For example, corn and cotton plants genetically engineered to produce Cry toxins (see, e.g., Aronson (2002) Cell Mol. Life Sci. 59(3):417-425; Schnepf et al. (1998) Microbiol. Mol. Biol. Rev. 62(3):775-806) are now widely used in agriculture and have provided the farmer with an alternative to traditional insect-control methods. However, in some instances these Bt insecticidal proteins may only protect plants from a relatively narrow range of pests. Evolving insect resistance has also presented an issue (Gassmann et al. (2014) PNAS 111(14):5141-6). Thus, novel insect control compositions remain desirable.

### BRIEF SUMMARY

[0005] Methods and compositions are provided which employ silencing elements that, when ingested by a plant insect pest, such as Coleopteran, Hemiptera, or Lepidopteran plant pest, including a Diabrotica, Leptinotarsa, Phyllotreta, Acyrthosiphan, Bemisia, Halyomorpha, Nezara, or Spodoptera plant pest, are capable of decreasing the expression of one or more target sequences in the pest. In certain embodiments, the decrease in expression of the target sequence controls the ability of the pest to reproduce, and thereby the methods and compositions are capable of limiting damage to a plant or the spread of insect pests. Described herein are various target polynucleotides as set forth in SEQ ID NOS.: 1-53 or 107-407, or variants or fragments thereof, or complements thereof, that modulate the expression of one or more of the sequences in the target pest RNAs involved in pest reproduction and fecundity. In certain embodiments, silencing element that target the various polynucleotides sequences as set forth in SEQ ID NOS.: 1-53 or 107-407, or variants or fragments thereof, or complements thereof, decrease the expression of the target sequence, thereby reducing the adult emergence of the insect. Accordingly, the various target polynucleotides as set forth in SEQ ID NOS.: 1-53 or 107-407, or variants or fragments thereof, or complements thereof, are useful in methods described herein, for example when combined in a molecular or breeding stack, to control target pests by insect sterilization and release of sterile target pests, i.e., sterile insect technique (“SIT”). Also provided are silencing elements, which when ingested by the pest, decrease the level of expression of one or more of the target polynucleotides. Further provided are constructs encoding silencing elements and host cells comprising constructs encoding silencing elements. Plants, plant parts, plant cells, bacteria and other host cells comprising the silencing elements or an active variant or fragment thereof are also provided. Also provided are formulations of sprayable silencing agents for topical applications to pest insects or substrates where pest insects may be found.

[0006] In another embodiment, a method for controlling a plant insect pest, such as a Coleopteran, Hemiptera, or Lepidopteran plant pest, including a Diabrotica, Leptinotarsa, Phyllotreta, Acyrthosiphan, Bemisia, Halyomorpha, Nezara, or Spodoptera plant pest, is provided. The method comprises feeding to a plant insect pest a composition comprising one or more silencing elements, wherein the silencing elements, when ingested by the pest, reduce the level of one or more target sequences in the pest and thereby control the pest. Further provided are methods to protect a plant from a plant insect pest. Such methods comprise introducing into the plant or plant part a disclosed silencing element. When the plant expressing the silencing element is ingested by the pest, the level of the target sequence is decreased and the pest is controlled.

[0007] In some embodiments, the compositions and methods relate to nucleic acid molecules encoding a first RNAi trait, wherein the first RNAi trait comprises a double stranded RNA having larvacidal activity on an insect when ingested by the insect or contacted with the insect, and a nucleic acid molecule encoding a second RNAi trait, wherein the second RNAi trait comprises a double stranded RNA that reduces the insect's fecundity when ingested by the insect or contacted with the insect. In one embodiment, the compositions and methods relate to DNA constructs comprising a nucleic acid molecule encoding a first silencing element, wherein the first silencing element has insect larvacidal activity on an insect when ingested by the insect or contacted with the insect, and a nucleic acid molecule encoding a second silencing element, wherein the second silencing element reduces the insect's fecundity when ingested by the insect or contacted with the insect. In another embodiment, the compositions and methods relate to DNA constructs comprising a nucleic acid molecule encoding a first silencing element, wherein the first silencing element has larvacidal activity on an insect when ingested by the insect or contacted with the insect, and a second nucleic acid molecule encoding a second silencing element, wherein the second silencing element reduces the insect's fecundity when ingested by the insect or contacted with the insect, and wherein either the first silencing element or the second silencing element reduces the insect's adult emergence when ingested by the insect or contacted with the insect. In another embodiment, the compositions and methods relate to a DNA construct comprising a nucleic acid molecule encoding a first silencing element, wherein the first silencing element has larvacidal activity on an insect when ingested by the insect or contacted with the insect, a second nucleic acid molecule encoding a second silencing element, wherein the second silencing element reduces the insect's fecundity when ingested by the insect or contacted with the insect, and a third nucleic acid molecule encoding a third silencing element, wherein the third silencing element reduces the insect's adult emergence when ingested by the insect or contacted with the insect.

[0008] In some embodiments, the compositions and methods relate to a breeding stack comprising a first nucleic acid molecule encoding a first silencing element having larvacidal activity on an insect and a second nucleic acid molecule encoding a second silencing element that reduces the insect's fecundity when ingested. In a further embodiment, the breeding stack further comprises a third nucleic acid molecule encoding a third silencing element that reduces the insect's adult emergence when ingested. In another embodiment, the compositions and methods relate to a breeding stack comprising a first nucleic acid molecule encoding a first silencing element having larvacidal activity on an insect and a second nucleic acid molecule encoding a second silencing element that reduces the insect's fecundity when ingested, and wherein either the first or the second silencing element reduces the insect's adult emergence when ingested.

[0009] In some embodiments, the compositions and methods relate to a molecular stack comprising a first nucleic acid molecule encoding a first silencing element having larvacidal activity on an insect and a second nucleic acid molecule encoding a second silencing element that reduces the insect's fecundity when ingested. In a further embodiment, the molecular stack further comprises a third nucleic acid molecule encoding a third silencing element that reduces the insect's adult emergence when ingested. In another embodiment, the compositions and methods relate to a molecular stack comprising a first nucleic acid molecule encoding a first silencing element having larvacidal activity on an insect and a second nucleic acid molecule encoding a second silencing element that reduces the insect's fecundity when ingested, and wherein either the first or the second silencing element reduces the insect's adult emergence when ingested.

[0010] In certain embodiments, the compositions and methods relate to a DNA construct comprising a nucleic acid molecule encoding a chimeric silencing element, wherein the chimeric silencing element targets a first gene and a second gene, and wherein the downregulation of the first gene reduces the fecundity of an insect when ingested by or contacted with the insect and the downregulation of the second gene causes larvacidal activity in the insect when ingested by or contacted with the insect. In a further embodiment, the chimeric silencing element further targets a third gene, wherein the downregulation of the third gene reduces the fecundity of the insect when ingested by or contacted with the insect. In some embodiments, the first target gene is expressed in either a male or a female specific pattern, and the third target gene is expressed in either a male or female specific pattern but not the same pattern as the first target gene. In some embodiments, the downregulation of a target gene by the chimeric silencing element causes reduced adult emergence in an insect when ingested by or contacted with the pest.

[0011] In some embodiments, the compositions and methods relate to a DNA construct, a molecular stack, or a breeding stack comprising a first silencing element targeting a first polynucleotide sequence set forth in any one of SEQ ID NOs: 1-53 or 107-407, wherein the downregulation of the first polynucleotide sequence reduces the fecundity of an insect, and a second silencing element targeting a second polynucleotide sequence set forth in any one of SEQ ID NOs: 254-259, wherein the downregulation of the second polynucleotide sequence causes larvacidal activity in the insect when ingested by or contacted with the insect. In further embodiments, the first or second silencing element may be a chimeric element. In certain embodiments, the first silencing element is a chimeric silencing element and targets a polynucleotide sequence set forth in SEQ ID NOs: 260-277.

### BRIEF DESCRIPTION OF THE DRAWINGS

[0012] FIGS. 1A-1D show representative data pertaining to sterilization of adult Western Corn Rootworm (“WCRW”) following ingestion of an artificial diet comprising a dsRNA construct comprising a target nucleotide sequence of SEQ ID NO.: 4. FIG. 1A shows the total number of eggs produced within 13-14 days by treatment and age group. For the younger female group, 50 pairs of male and female beetles were used, and for the older female group 50 mated female beetles were used. FIG. 1B shows the average number of eggs produced per female/day during 13-14 day oviposition period by treatment and age group. The box plot graph is produced by Spotfire program indicating 4 quartiles, average, and 95% confidence interval of the mean. FIG. 1C shows the effect of various treatments, as indicated in the figure, on overall average egg hatch rate. Data represents 13-14 days egg collection period; n=6 replication/treatment/day; 5-45 eggs/replication depending on the day (p<0.001). FIG. 1D shows gene suppression analysis in WCRW adult beetles 8 days after treatment of female and male insects for younger age group and 4 days after treatment of female insects for older age group. Relative expression of VgR is shown from 4 individual insects for each treatment using the DV-RPS10 gene as reference and untreated older beetle as normalizer. Box plot shows 4 quartiles, average, median, and 95% confidence interval of the mean by treatment and age group.

[0013] FIGS. 2A-2B show representative data pertaining to sterilization of WCRW following feeding 3^{rd} instar larvae with an artificial diet comprising a dsRNA construct comprising a target nucleotide sequence of SEQ ID NO.: 4. FIG. 2A shows the average numbers and viable eggs produced per female. Eggs from 15-42 female adult beetles were counted for each treatment. The number in the box shows average numbers of eggs or viable eggs/female. The box plot shows 4 quartiles, average, median, and 95% confidence interval of the mean for each treatment. For the VgR dsRNA exposed group, viable egg production remain very low throughout the study period. Treatment with VgR dsRNA did not affect adult emergence. Mortality of adult beetles due to VgR dsRNA larval exposure was negligible. FIG. 2B shows VgR gene suppression analysis in 4 10-day old beetles and more than 15 28-day old beetles at Days 40 and 58 after treatment, respectively. Box plot of relative expression by qRTPCR shows 4 quartiles, average, median, and 95% confidence interval of the mean for each treatment in 10 and 28 day old beetles. Untreated 3^{rd} instar larvae were used as normalizer.

[0014] FIGS. 3A-3C show data pertaining to the dose response of WCRW sterilization and gene suppression in WCRW following exposure to an artificial diet comprising a dsRNA comprising a target nucleotide sequence of SEQ ID NO.: 3. FIG. 3A shows the total number of eggs and eggs/female produced during 18 days study period in response to VgR dsRNA doses. Eggs were collected and counted over 18 day oviposition period. Viable eggs/female and net reduction in fecundity (%) are indicated in the last two columns. Net reduction in fecundity (NRF) of VgR dsRNA treated females relative to control (water exposed females) was estimated using the formula described in the Examples. FIG. 3B shows a box plot of percentage of overall egg hatch rates by dose. Data represents 18 days egg collection period; n=1-4 replication/treatment/day; 5-478 eggs/replication depending on the day and availability of eggs. FIG. 3C shows a box plot of relative expression of VgR Day 6 after dsVgR treatment at different doses. Untreated beetles were used as normalizer.

[0015] FIGS. 4A-4B show data pertaining to VgR gene suppression following ingestion of various VgR dsRNA fragments. FIG. 4A shows schematic depiction of the VgR fragments and amplicons of qRTPCR assays (indicated by dashed circles) on VgR coding DNA sequence (“CDS”). FIG. 4B shows a box plot of relative VgR expression 6 days after treatment with dsVgR fragments and controls (ddH2O and dsGUS) using 5′-qRTPCR assay. 4 quartiles, average (horizontal solid line), median (horizontal dash line), and 95% confidence interval of the mean are shown. Similar results were also obtained with Mid- and 3′-qRTPCR assays. Data were normalized to results obtained from untreated 3rd instar larvae.

[0016] FIGS. 5A-5D show data pertaining to VgR fragment screen using gene suppression analysis. FIG. 5A shows a schematic depiction of the VgR fragments used in screen for gene suppression analysis. FIGS. 5B-5D shows representative gene analysis for the indicated VgR fragments using results obtained in three experiments. In each experiment, treatments by water, GUS, and VgR fragment 1 (SEQ ID NO.:3) were included as controls. Data were normalized to beetles treated with water. Two qRTPCR assays (5′- and Mid-qRTPCR assays) were used to avoid overlapping of VgR fragment and PCR amplicon.

[0017] FIGS. 6A-6B show data pertaining to VgR gene suppression in beetles ingesting transgenic plants expressing VgR dsRNA constructs as indicated in the figure. VgR expression in planta is indicated at the bottom of each figure. FIG. 6A shows data in plants at about the V4 growth stage which were infested with at least 14 young female beetles in cages. The plant type is as indicated in the figure, with “NTG” indicating non-transgenic control plants; “Frag1” indicates transgenic plants expressing a silencing element comprising VgR-Frag1 (SEQ ID NO.: 3); “Frag2” indicates transgenic plants expressing a silencing element comprising VgR-Frag2 (SEQ ID NO.: 4), and “Frag3” indicates transgenic plants expressing a silencing element comprising VgR-Frag3 (SEQ ID NO.: 5), Beetles were collected 8 days after feeding for gene suppression analysis. Data were normalized to data from beetles ingesting the NTG control. FIG. 6B shows data obtained from individual R1 maize plants were infested with more than 6 young female beetles in cages. Beetles were collected 12 days after feeding. Each fragment and control is represented by 2 plants used for feeding and more than 12 insects used in gene suppression analysis.

[0018] FIG. 7 shows data pertaining to a fecundity assessment of VgR T1 adult beetle exposure bioassay. For each construct 2-4 events were tested. Each cage received an oviposition dish daily and/or at interval of 2-4 days and eggs were subsequently processed.

[0019] FIG. 8 shows data pertaining to fecundity assessment of VgR T1 larval exposure bioassay. For each event three replicate cages containing at least 8-14 pairs of male and female beetles were arranged. Each cage received oviposition dish every 5 days, and eggs were processed

[0020] FIGS. 9A-9B show data pertaining to WCRW adult sterilization bioassay and gene suppression by DV-BOULE-FRAG1 (SEQ ID NO: 164) dsRNA treatment. FIG. 9A shows the total number of eggs and fertile eggs produced per female; average egg hatch rate with standard error of the mean; reduction in total egg production per female and net reduction in fecundity of female beetles relative to water control. FIG. 9B shows gene expression in beetles after BOULE dsRNA treatment. Relative expression by qRTPCR assay was described in previous examples. The box plot shows four quartiles, average (horizontal dash line), median (horizontal solid line), and 95% confidence interval of the mean are shown.

[0021] FIG. 10 shows data pertaining to beetle counts from larval exposure to BOULE FRAG1 (SEQ ID NO: 164) dsRNA-expressing T1 transgenic plants. The box plot shows four quartiles, average (horizontal dash line), median (horizontal solid line), and 95% confidence interval of the mean. Average expression levels of the BOULE dsRNA fragment in planta for each event were determined in root samples using in vitro transcription (IVT) product as control.

[0022] FIGS. 11A-11C show data pertaining to WCRW larval exposure to BOULE transgenic T1 plants causing adult sterilization. FIG. 11A shows the effect of larval exposure to transgenic plants (expressing DV-BOULE-FRAG1, SEQ ID NO: 164) on the overall average egg production per female and average viable eggs produced per female from emerged beetles. Line in each bar represents the standard error of the mean (±SEM) and the same color bars followed by the same upper or lower case letters are not statistically different. FIG. 11B shows the effect of larval exposure to transgenic plants (expressing DV-BOULE-FRAG1, SEQ ID NO: 164) on hatch rate of eggs obtained from the emerged beetles. The box plot shows four quartiles, average (horizontal white line) and 95% confidence interval of the mean (vertical black line). The average and the corresponding standard error of the means ((±SEM) are indicated at the bottom of the box plot. For each treatment egg hatch test was performed for 5 batches of eggs and a total of at least 1200-1285 eggs per treatment were assessed for viability. FIG. 11C indicates the effect of larval exposure to transgenic plants (expressing DV-BOULE-FRAG1, SEQ ID NO: 164) on net reduction in fecundity of emerged adult beetles relative to NTG control. The box plot shows four quartiles, average (horizontal black line) and 95% confidence interval of the mean (vertical black line). The average and the corresponding standard error of the mean are indicated at the bottom of the box plot.

[0023] FIG. 12 shows data pertaining to 3rd instar sterilization bioassay of dsRNA targeting DV-CUL3-FRAG1, DV-NCLB-FRAG1, and DV-MAEL-FRAG1 dsRNA (SEQ ID No.: 44, 45, and 46 respectively) at 1 ppm. The average total number of eggs produced per female, the average number of viable eggs produced per female, the average egg hatch rate; average reduction in egg production and net reduction in fecundity (both relative to water control) are shown. For each parameter the respective standard error of the mean are presented.

[0024] FIG. 13 is a diagram representing a chimera design and a construct map representing a molecular stacking embodiment.

### DETAILED DESCRIPTION

[0025] The disclosures herein will be described more fully hereinafter with reference to the accompanying drawings, in which some, but not all possible embodiments are shown. Indeed, disclosures may be embodied in many different forms and should not be construed as limited to the embodiments set forth herein; rather, these embodiments are provided so that this disclosure will satisfy applicable legal requirements.

[0026] Many modifications and other embodiments disclosed herein will come to mind to one skilled in the art to which the disclosed compositions and methods pertain having the benefit of the teachings presented in the foregoing descriptions and the associated drawings. Therefore, it is to be understood that the disclosures are not to be limited to the specific embodiments disclosed and that modifications and other embodiments are intended to be included within the scope of the appended claims. Although specific terms are employed herein, they are used in a generic and descriptive sense only and not for purposes of limitation.

[0027] It is also to be understood that the terminology used herein is for the purpose of describing particular aspects only and is not intended to be limiting. As used in the specification and in the claims, the term “comprising” can include the aspect of “consisting of.” Unless defined otherwise, all technical and scientific terms used herein have the same meaning as commonly understood by one of ordinary skill in the art to which the disclosed compositions and methods belong. In this specification and in the claims which follow, reference will be made to a number of terms which shall be defined herein.

[0028] As used herein the singular forms “a”, “and”, and “the” include plural referents unless the context clearly dictates otherwise. Thus, for example, reference to “a cell” includes a plurality of such cells and reference to “the protein” includes reference to one or more proteins and equivalents thereof known to those skilled in the art, and so forth. All technical and scientific terms used herein have the same meaning as commonly understood to one of ordinary skill in the art to which this invention belongs unless clearly indicated otherwise.

### I. Overview

[0029] Methods and compositions are provided which employ one or more silencing elements that, when ingested by a plant insect pest, such as Coleopteran, Hemiptera, or Lepidopteran plant pest, including a Diabrotica, Leptinotarsa, Phyllotreta, Acyrthosiphan, Bemisia, Halyomorpha, Nezara, or Spodoptera plant pest, are capable of decreasing the expression of a target sequence in the pest. In certain embodiments, the decrease in expression of the one or more target sequences controls the ability of the pest to reproduce, and thereby the methods and compositions are capable of limiting damage to a plant or the spread of insect pests. Disclosed herein are target polynucleotides as set forth in SEQ ID NOS.: 1-53 or 107-407, or variants and fragments thereof, and complements thereof. Silencing elements comprising sequences, complementary sequences, active fragments or variants of these target polynucleotides are provided which, when ingested by or when contacting the pest, decrease the expression of one or more of the target sequences and thereby controls the pest population via, for example, insect sterilization or through the application of sterile insect technique (SIT; i.e., the silencing elements are associated with sterilization activity). In some embodiments, a transgenic plant comprising a polynucleotide encoding one or more silencing elements are provided which, when ingested by or when contacting the pest, decrease the expression of one or more of the target sequences and thereby controls the pest population via, for example, insect sterilization or through the application of SIT.

[0030] In one embodiment, a method relates to producing sterile insects; releasing sterile insects into the environment in very large numbers (about 10 to 100 times the number of native insects) in order to mate with the native insects that are present in the environment, wherein the native female that mates with a sterile male produce infertile eggs. In a further embodiment, releasing sterile insects is repeated one or more times, wherein the number of native insects decreases and the ratio of sterile to native insects increases, driving the native population size downwards.

[0031] It is understood that target pest RNAs can be involved in one or more of male and/or female sterility, reduction of sperm count, egg production (fecundity), gender ratios, rates of fertilization (fertility), maturation of sexual organs, and sperm or egg viability. SIT has been used to control insect population by mating-based approach through release of sterile insects of one or both genders. In one embodiment, SIT comprises release of large number of sterile male insects that search for and mate with wild females, thereby preventing offspring. SIT using different schemes to generate sterile insects has been reported to control mosquito populations such as Anopheles or Aedes (e.g., see Whyard, et al. (2015) Parasit. Vectors, 8:96; Benedict, M. Q. and A. S. Robinson (2003) Trends Parasitol. 19(8):349; and Nolan, et al. (2011) Genetica 139:33). SIT has been field evaluated for population control of Aedes aegypti in Brazil (Carvalho, D. O. (2015), PLoS. 9(7): e0003864). Dengue, chikungunya, and now Zika virus are all transmitted by Aedes aegypti, one of the most widespread disease-carrying vectors on the globe.

[0032] In one embodiment, a method relates to producing sterile insects; releasing sterile insects into an environment in about 0.5, 1, 5, 10, 20, 30, 50, 60, 70, 90, to 100 times the number of native insects, wherein the sterile insects mate with the native insects that are present in the environment, and wherein the native female that mates with a sterile male produce infertile eggs. In a further embodiment, releasing sterile insects is repeated one or more times, wherein the number of native insects decreases and the ratio of sterile to native insects increases, driving the native population size downwards.

[0033] In one embodiment, compositions and methods are provided which employ a ribonucleic acid construct comprising at least one double-stranded RNA region, at least one strand of which comprises a polynucleotide that is complementary to: (a) a nucleotide sequence comprising a sequence of an RNA transcript expressed in a target pest, wherein the down-regulation of the RNA transcript results in increased sterility in the target; or variants and fragments thereof, and complements of said nucleotide sequence; (b) the nucleotide sequence comprising at least 90% sequence identity to said nucleotide sequence; or variants and fragments thereof, and complements thereof; or (c) the nucleotide sequence comprising at least 19 consecutive nucleotides of said nucleotide sequence; or variants and fragments thereof, and complements thereof; wherein the polynucleotide encodes a silencing element having sterilization activity against an insect plant pest.

[0034] In a further embodiment, compositions and methods are provided which employ a ribonucleic acid construct comprising at least one double-stranded RNA region, at least one strand of which comprises a polynucleotide that is complementary to: (a) a nucleotide sequence comprising a sequence of an RNA transcript expressed in a Coleopteran pest, wherein the down-regulation of the RNA transcript results in increased sterility in the target; or variants and fragments thereof, and complements of said nucleotide sequence; (b) the nucleotide sequence comprising at least 90% sequence identity to said nucleotide sequence; or variants and fragments thereof, and complements thereof; or (c) the nucleotide sequence comprising at least 19 consecutive nucleotides of said nucleotide sequence; or variants and fragments thereof, and complements thereof; wherein the polynucleotide encodes a silencing element having sterilization activity against an insect plant pest.

[0035] In another embodiment, compositions and methods are provided which employ a ribonucleic acid construct comprising at least one double-stranded RNA region, at least one strand of which comprises a polynucleotide that is complementary to: (a) the nucleotide sequence comprising any one or more of SEQ ID NOS: 1-53 or 107-407; or variants and fragments thereof, and complements thereof; (b) the nucleotide sequence comprising at least 90% sequence identity to any one or more of nucleotides SEQ ID NOS: 1-53 or 107-407; or variants and fragments thereof, and complements thereof; or (c) the nucleotide sequence comprising at least 19 consecutive nucleotides of any one or more of SEQ ID NOS: 1-53 or 107-407; or variants and fragments thereof, and complements thereof; wherein the polynucleotide encodes a silencing element having sterilization activity against an insect plant pest.

[0036] As used herein, “VgR protein” or “vitellogenin receptor protein” refers to a family of large (180-214 kDa), membrane-bound proteins, and include proteins such as the VgR protein having the sequence of SEQ ID NO.: 106, and variants, homologs, and mutants thereof. It is believed that these proteins bind with high affinity to vitellogenin (K_{d} values of about 30-180 nM) and are involved in the cellular uptake of vitellogenin. VgR protein is typically expressed in ovarian tissue. As used herein, “BOULE” refers to a family of genes that encode a RNA binding protein with a highly conserved RRM (RNA recognition motif) domain and at least one DAZ (deleted in azoospermia) repeat of 24 amino acids rich in Asn, Tyr, and Gln residues. Deletion or mutations of BOULE in fly usually severely impair spermatogenesis. BOULE is required for meiotic entry and germline differentiation at the transition between G2 and M phases of meiosis. BOULE is typically expressed in germline cells.

[0037] As used herein, “VgR mRNA” or “vitellogenin receptor mRNA” refers to a messenger RNA transcript that when translated provides a VgR protein, or a variant, homolog, or mutant protein thereof.

[0038] As used herein, by “controlling a plant insect pest” or “controls a plant insect pest” is intended any effect on a plant insect pest that results in limiting the damage that the pest causes. Controlling a plant insect pest includes, but is not limited to, killing the pest, inhibiting development of the pest, altering fertility or growth of the pest in such a manner that the pest provides less damage to the plant, or in a manner for decreasing the number of offspring produced, producing less fit pests, including offspring, producing pests more susceptible to predator attack, producing pests more susceptible to other insecticidal proteins, or deterring the pests from eating the plant. As used herein, the term “larvacidal activity” refers to controlling an insect during any larval life stage. As used herein, the term “reduced fecundity” or “reduces the fecundity” refers to altering fertility or growth of an insect in such a manner for decreasing the number of offspring produced, producing less fit insects, including offspring, or producing pests more susceptible to predator attack thereby reducing the fitness of the insect.

[0039] Reducing the level of expression of the target polynucleotide or the polypeptide encoded thereby, in the pest results in the suppression, control, and/or killing the invading pest. In one embodiment, reducing the level of expression of the target sequence of the pest will reduce the pest damage by at least about 2% to at least about 6%, at least about 5% to about 50%, at least about 10% to about 60%, at least about 30% to about 70%, at least about 40% to about 80%, or at least about 50% to about 90% or greater. Hence, methods disclosed herein can be utilized to control pests, including but not limited to, Coleopteran plant insect pests or a Diabrotica plant pest.

[0040] Certain assays measuring the control of a plant insect pest are commonly known in the art, as are methods to record nodal injury score. See, for example, Oleson et al. (2005) J. Econ. Entomol. 98:1-8. Other assay methods are provided in the examples below.

[0041] Disclosed herein are compositions and methods for protecting plants from a plant insect pest, or inducing resistance in a plant to a plant insect pest, such as Coleopteran plant pests or Diabrotica plant pests or other plant insect pests. Plant insect pests include insects selected from the orders Coleoptera, Diptera, Hymenoptera, Lepidoptera, Mallophaga, Homoptera, Hemiptera Orthroptera, Thysanoptera, Dermaptera, Isoptera, Anoplura, Siphonaptera, Trichoptera, etc., particularly Lepidoptera and Coleoptera.

[0042] Those skilled in the art will recognize that not all compositions are equally effective against all pests. Disclosed compositions, including the silencing elements disclosed herein, display activity against plant insect pests, which may include economically important agronomic, forest, greenhouse, nursery ornamentals, food and fiber, public and animal health, domestic and commercial structure, household and stored product pests.

[0043] As used herein “Coleopteran plant pest” is used to refer to any member of the Coleoptera order. Other plant insect pests that may be targeted by the methods and compositions disclosed herein, but are not limited to Mexican Bean Beetle (Epilachna varivestis), and Colorado potato beetle (Leptinotarsa decemlineata).

[0044] As used herein, the term “Diabrotica plant pest” is used to refer to any member of the Diabrotica genus. Accordingly, the compositions and methods are also useful in protecting plants against any Diabrotica plant pest including, for example, Diabrotica adelpha; Diabrotica amecameca; Diabrotica balteata; Diabrotica barberi; Diabrotica biannularis; Diabrotica cristata; Diabrotica decempunctata; Diabrotica dissimilis; Diabrotica lemniscata; Diabrotica limitata (including, for example, Diabrotica limitata quindecimpuncata); Diabrotica longicornis; Diabrotica nummularis; Diabrotica porracea; Diabrotica scutellata; Diabrotica sexmaculata; Diabrotica speciosa (including, for example, Diabrotica speciosa speciosa); Diabrotica tibialis; Diabrotica undecimpunctata (including, for example, Southern corn rootworm (Diabrotica undecimpunctata), Diabrotica undecimpunctata duodecimnotata; Diabrotica undecimpunctata howardi (spotted cucumber beetle); Diabrotica undecimpunctata undecimpunctata (western spotted cucumber beetle)); Diabrotica virgifera (including, for example, Diabrotica virgifera virgifera (western corn rootworm) and Diabrotica virgifera zeae (Mexican corn rootworm)); Diabrotica viridula; Diabrotica wartensis; Diabrotica sp. JJG335; Diabrotica sp. JJG336; Diabrotica sp. JJG341; Diabrotica sp. JJG356; Diabrotica sp. JJG362; and, Diabrotica sp. JJG365.

[0045] In certain embodiments, the Diabrotica plant pest comprises D. virgifera virgifera, D. barberi, D. virgifera zeae, D. speciosa, or D. undecimpunctata howardi.

[0046] Larvae of the order Lepidoptera include, but are not limited to, armyworms, cutworms, loopers and heliothines in the family Noctuidae Spodoptera frugiperda JE Smith (fall armyworm); S. exigua Hübner (beet armyworm); S. litura Fabricius (tobacco cutworm, cluster caterpillar); Mamestra configurata Walker (bertha armyworm); M. brassicae Linnaeus (cabbage moth); Agrotis ipsilon Hufnagel (black cutworm); A. orthogonia Morrison (western cutworm); A. subterranea Fabricius (granulate cutworm); Alabama argillacea Hübner (cotton leaf worm); Trichoplusia ni Hübner (cabbage looper); Pseudoplusia includens Walker (soybean looper); Anticarsia gemmatalis Hübner (velvetbean caterpillar); Hypena scabra Fabricius (green cloverworm); Heliothis virescens Fabricius (tobacco budworm); Pseudaletia unipuncta Haworth (armyworm); Athetis mindara Barnes and Mcdunnough (rough skinned cutworm); Euxoa messoria Harris (darksided cutworm); Earias insulana Boisduval (spiny bollworm); E. vittella Fabricius (spotted bollworm); Helicoverpa armigera Hübner (American bollworm); H. zea Boddie (corn earworm or cotton bollworm); Melanchra picta Harris (zebra caterpillar); Egira (Xylomyges) curialis Grote (citrus cutworm); borers, casebearers, webworms, coneworms, and skeletonizers from the family Pyralidae Ostrinia nubilalis Hübner (European corn borer); Amyelois transitella Walker (naval orangeworm); Anagasta kuehniella Zeller (Mediterranean flour moth); Cadra cautella Walker (almond moth); Chilo suppressalis Walker (rice stem borer); C. partellus, (sorghum borer); Corcyra cephalonica Stainton (rice moth); Crambus caliginosellus Clemens (corn root webworm); C. teterrellus Zincken (bluegrass webworm); Cnaphalocrocis medinalis Clemens (rice leaf roller); Desmia funeralis Hübner (grape leaffolder); Diaphania hyalinata Linnaeus (melon worm); D. nitidalis Stoll (pickleworm); Diatraea grandiosella Dyar (southwestern corn borer), D. saccharalis Fabricius (surgarcane borer); Eoreuma loftini Dyar (Mexican rice borer); Ephestia elutella Hübner (tobacco (cacao) moth); Galleria mellonella Linnaeus (greater wax moth); Herpetogramma licarsisalis Walker (sod webworm); Homoeosoma electellum Hulst (sunflower moth); Elasmopalpus lignosellus Zeller (lesser cornstalk borer); Achroia grisella Fabricius (lesser wax moth); Loxostege sticticalis Linnaeus (beet webworm); Orthaga thyrisalis Walker (tea tree web moth); Maruca testulalis Geyer (bean pod borer); Plodia interpunctella Hübner (Indian meal moth); Scirpophaga incertulas Walker (yellow stem borer); Udea rubigalis Guenée (celery leaftier); and leafrollers, budworms, seed worms and fruit worms in the family Tortricidae Acleris gloverana Walsingham (Western blackheaded budworm); A. variana Fernald (Eastern blackheaded budworm); Archips argyrospila Walker (fruit tree leaf roller); A. rosana Linnaeus (European leaf roller); and other Archips species, Adoxophyes orana Fischer von Rösslerstamm (summer fruit tortrix moth); Cochylis hospes Walsingham (banded sunflower moth); Cydia latiferreana Walsingham (filbertworm); C. pomonella Linnaeus (coding moth); Platynota flavedana Clemens (variegated leafroller); P. stultana Walsingham (omnivorous leafroller); Lobesia botrana Denis & Schiffermüller (European grape vine moth); Spilonota ocellana Denis & Schiffermiffier (eyespotted bud moth); Endopiza viteana Clemens (grape berry moth); Eupoecilia ambiguella Hübner (vine moth); Bonagota salubricola Meyrick (Brazilian apple leafroller); Grapholita molesta Busck (oriental fruit moth); Suleima helianthana Riley (sunflower bud moth); Argyrotaenia spp.; Choristoneura spp.

[0047] Selected other agronomic pests in the order Lepidoptera include, but are not limited to, Alsophila pometaria Harris (fall cankerworm); Anarsia lineatella Zeller (peach twig borer); Anisota senatoria J. E. Smith (orange striped oakworm); Antheraea pernyi Guérin-Meneville (Chinese Oak Tussah Moth); Bombyx mori Linnaeus (Silkworm); Bucculatrix thurberiella Busck (cotton leaf perforator); Colias eurytheme Boisduval (alfalfa caterpillar); Datana integerrima Grote & Robinson (walnut caterpillar); Dendrolimus sibiricus Tschetwerikov (Siberian silk moth), Ennomos subsignaria Hübner (elm spanworm); Erannis tiliaria Harris (linden looper); Euproctis chrysorrhoea Linnaeus (browntail moth); Harrisina americana Guérin-Méneville (grapeleaf skeletonizer); Hemileuca oliviae Cockrell (range caterpillar); Hyphantria cunea Drury (fall webworm); Keiferia lycopersicella Walsingham (tomato pinworm); Lambdina fiscellaria fiscellaria Hulst (Eastern hemlock looper); L. fiscellaria lugubrosa Hulst (Western hemlock looper); Leucoma salicis Linnaeus (satin moth); Lymantria dispar Linnaeus (gypsy moth); Manduca quinquemaculata Haworth (five spotted hawk moth, tomato hornworm); M. sexta Haworth (tomato hornworm, tobacco hornworm); Operophtera brumata Linnaeus (winter moth); Paleacrita vernata Peck (spring cankerworm); Papilio cresphontes Cramer (giant swallowtail orange dog); Phryganidia californica Packard (California oakworm); Phyllocnistis citrella Stainton (citrus leafminer); Phyllonorycter blancardella Fabricius (spotted tentiform leafminer); Pieris brassicae Linnaeus (large white butterfly); P. rapae Linnaeus (small white butterfly); P. napi Linnaeus (green veined white butterfly); Platyptilia carduidactyla Riley (artichoke plume moth); Plutella xylostella Linnaeus (diamondback moth); Pectinophora gossypiella Saunders (pink bollworm); Pontia protodice Boisduval and Leconte (Southern cabbageworm); Sabulodes aegrotata Guenée (omnivorous looper); Schizura concinna J. E. Smith (red humped caterpillar); Sitotroga cerealella Olivier (Angoumois grain moth); Thaumetopoea pityocampa Schiffermuller (pine processionary caterpillar); Tineola bisselliella Hummel (webbing clothesmoth); Tuta absoluta Meyrick (tomato leafminer); Yponomeuta padella Linnaeus (ermine moth); Heliothis subflexa Guenée; Malacosoma spp. and Orgyia spp.

[0048] Of interest are larvae and adults of the order Coleoptera including weevils from the families Anthribidae, Bruchidae and Curculionidae (including, but not limited to: Anthonomus grandis Boheman (boll weevil); Lissorhoptrus oryzophilus Kuschel (rice water weevil); Sitophilus granarius Linnaeus (granary weevil); S. oryzae Linnaeus (rice weevil); Hypera punctata Fabricius (clover leaf weevil); Cylindrocopturus adspersus LeConte (sunflower stem weevil); Smicronyx fulvus LeConte (red sunflower seed weevil); S. sordidus LeConte (gray sunflower seed weevil); Sphenophorus maidis Chittenden (maize billbug)); flea beetles, cucumber beetles, rootworms, leaf beetles, potato beetles and leafminers in the family Chrysomelidae (including, but not limited to: Leptinotarsa decemlineata Say (Colorado potato beetle); Diabrotica virgifera virgifera LeConte (western corn rootworm); D. barberi Smith and Lawrence (northern corn rootworm); D. undecimpunctata howardi Barber (southern corn rootworm); Chaetocnema pulicaria Melsheimer (corn flea beetle); Phyllotreta cruciferae Goeze (Crucifer flea beetle); Phyllotreta striolata (stripped flea beetle); Colaspis brunnea Fabricius (grape colaspis); Oulema melanopus Linnaeus (cereal leaf beetle); Zygogramma exclamationis Fabricius (sunflower beetle)); beetles from the family Coccinellidae (including, but not limited to: Epilachna varivestis Mulsant (Mexican bean beetle)); chafers and other beetles from the family Scarabaeidae (including, but not limited to: Popillia japonica Newman (Japanese beetle); Cyclocephala borealis Arrow (northern masked chafer, white grub); C. immaculata Olivier (southern masked chafer, white grub); Rhizotrogus majalis Razoumowsky (European chafer); Phyllophaga crinita Burmeister (white grub); Ligyrus gibbosus De Geer (carrot beetle)); carpet beetles from the family Dermestidae; wireworms from the family Elateridae, Eleodes spp., Melanotus spp.; Conoderus spp.; Limonius spp.; Agriotes spp.; Ctenicera spp.; Aeolus spp.; bark beetles from the family Scolytidae and beetles from the family Tenebrionidae.

[0049] Adults and immatures of the order Diptera are of interest, including leafminers Agromyza parvicornis Loew (corn blotch leafminer); midges (including, but not limited to: Contarinia sorghicola Coquillett (sorghum midge); Mayetiola destructor Say (Hessian fly); Sitodiplosis mosellana Gain (wheat midge); Neolasioptera murtfeldtiana Felt, (sunflower seed midge)); fruit flies (Tephritidae), Oscinella frit Linnaeus (fruit flies); maggots (including, but not limited to: Delia platura Meigen (seedcorn maggot); D. coarctata Fallen (wheat bulb fly) and other Delia spp., Meromyza americana Fitch (wheat stem maggot); Musca domestica Linnaeus (house flies); Fannia canicularis Linnaeus, F. femoralis Stein (lesser house flies); Stomoxys calcitrans Linnaeus (stable flies)); face flies, horn flies, blow flies, Chrysomya spp.; Phormia spp. and other muscoid fly pests, horse flies Tabanus spp.; bot flies Gastrophilus spp.; Oestrus spp.; cattle grubs Hypoderma spp.; deer flies Chrysops spp.; Melophagus ovinus Linnaeus (keds) and other Brachycera, mosquitoes Aedes spp.; Anopheles spp.; Culex spp.; black flies Prosimulium spp.; Simulium spp.; biting midges, sand flies, sciarids, and other Nematocera.

[0050] Included as insects of interest are adults and nymphs of the orders Hemiptera and Homoptera such as, but not limited to, adelgids from the family Adelgidae, plant bugs from the family Miridae, cicadas from the family Cicadidae, leafhoppers, Empoasca spp.; from the family Cicadellidae, planthoppers from the families Cixiidae, Flatidae, Fulgoroidea, Issidae and Delphacidae, treehoppers from the family Membracidae, psyllids from the family Psyllidae, whiteflies from the family Aleyrodidae, aphids from the family Aphididae, phylloxera from the family Phylloxeridae, mealybugs from the family Pseudococcidae, scales from the families Asterolecanidae, Coccidae, Dactylopiidae, Diaspididae, Eriococcidae Ortheziidae, Phoenicococcidae and Margarodidae, lace bugs from the family Tingidae, stink bugs from the family Pentatomidae, cinch bugs, Blissus spp.; and other seed bugs from the family Lygaeidae, spittlebugs from the family Cercopidae squash bugs from the family Coreidae and red bugs and cotton stainers from the family Pyrrhocoridae.

[0051] Agronomically important members from the order Homoptera further include, but are not limited to: Acyrthisiphon pisum Harris (pea aphid); Aphis craccivora Koch (cowpea aphid); A. fabae Scopoli (black bean aphid); A. gossypii Glover (cotton aphid, melon aphid); A. maidiradicis Forbes (corn root aphid); A. pomi De Geer (apple aphid); A. spiraecola Patch (spirea aphid); Aulacorthum solani Kaltenbach (foxglove aphid); Chaetosiphon fragaefolii Cockerell (strawberry aphid); Diuraphis noxia Kurdjumov/Mordvilko (Russian wheat aphid); Dysaphis plantaginea Paaserini (rosy apple aphid); Eriosoma lanigerum Hausmann (woolly apple aphid); Brevicoryne brassicae Linnaeus (cabbage aphid); Hyalopterus pruni Geoffroy (mealy plum aphid); Lipaphis erysimi Kaltenbach (turnip aphid); Metopolophium dirrhodum Walker (cereal aphid); Macrosiphum euphorbiae Thomas (potato aphid); Myzus persicae Sulzer (peach-potato aphid, green peach aphid); Nasonovia ribisnigri Mosley (lettuce aphid); Pemphigus spp. (root aphids and gall aphids); Rhopalosiphum maidis Fitch (corn leaf aphid); R. padi Linnaeus (bird cherry-oat aphid); Schizaphis graminum Rondani (greenbug); Sipha flava Forbes (yellow sugarcane aphid); Sitobion avenae Fabricius (English grain aphid); Therioaphis maculata Buckton (spotted alfalfa aphid); Toxoptera aurantii Boyer de Fonscolombe (black citrus aphid) and T. citricida Kirkaldy (brown citrus aphid); Adelges spp. (adelgids); Phylloxera devastatrix Pergande (pecan phylloxera); Bemisia tabaci Gennadius (tobacco whitefly, sweetpotato whitefly); B. argentifolii Bellows & Perring (silverleaf whitefly); Dialeurodes citri Ashmead (citrus whitefly); Trialeurodes abutiloneus (bandedwinged whitefly) and T. vaporariorum Westwood (greenhouse whitefly); Empoasca fabae Harris (potato leafhopper); Laodelphax striatellus Fallen (smaller brown planthopper); Macrolestes quadrilineatus Forbes (aster leafhopper); Nephotettix cinticeps Uhler (green leafhopper); N. nigropictus Stål (rice leafhopper); Nilaparvata lugens Stål (brown planthopper); Peregrinus maidis Ashmead (corn planthopper); Sogatella furcifera Horvath (white-backed planthopper); Sogatodes orizicola Muir (rice delphacid); Typhlocyba pomaria McAtee (white apple leafhopper); Erythroneoura spp. (grape leafhoppers); Magicicada septendecim Linnaeus (periodical cicada); Icerya purchasi Maskell (cottony cushion scale); Quadraspidiotus perniciosus Comstock (San Jose scale); Planococcus citri Risso (citrus mealybug); Pseudococcus spp. (other mealybug complex); Cacopsylla pyricola Foerster (pear psylla); Trioza diospyri Ashmead (persimmon psylla).

[0052] Agronomically important species of interest from the order Hemiptera include, but are not limited to: Acrosternum hilare Say (green stink bug); Anasa tristis De Geer (squash bug); Blissus leucopterus leucopterus Say (chinch bug); Corythuca gossypii Fabricius (cotton lace bug); Cyrtopeltis modesta Distant (tomato bug); Dysdercus suturellus Herrich-Schäffer (cotton stainer); Euschistus servus Say (brown stink bug); E. variolarius Palisot de Beauvois (one-spotted stink bug); Graptostethus spp. (complex of seed bugs); Leptoglossus corculus Say (leaf-footed pine seed bug); Lygus lineolaris Palisot de Beauvois (tarnished plant bug); L. Hesperus Knight (Western tarnished plant bug); L. pratensis Linnaeus (common meadow bug); L. rugulipennis Poppius (European tarnished plant bug); Lygocoris pabulinus Linnaeus (common green capsid); Nezara viridula Linnaeus (southern green stink bug); Oebalus pugnax Fabricius (rice stink bug); Oncopeltus fasciatus Dallas (large milkweed bug); Pseudatomoscelis seriatus Reuter (cotton fleahopper).

[0053] Furthermore, embodiments may be effective against Hemiptera such, Calocoris norvegicus Gmelin (strawberry bug); Orthops campestris Linnaeus; Plesiocoris rugicollis Fallen (apple capsid); Cyrtopeltis modestus Distant (tomato bug); Cyrtopeltis notatus Distant (suckfly); Spanagonicus albofasciatus Reuter (whitemarked fleahopper); Diaphnocoris chlorionis Say (honeylocust plant bug); Labopidicola allii Knight (onion plant bug); Pseudatomoscelis seriatus Reuter (cotton fleahopper); Adelphocoris rapidus Say (rapid plant bug); Poecilocapsus lineatus Fabricius (four-lined plant bug); Nysius ericae Schilling (false chinch bug); Nysius raphanus Howard (false chinch bug); Nezara viridula Linnaeus (Southern green stink bug); Eurygaster spp.; Coreidae spp.; Pyrrhocoridae spp.; Tinidae spp.; Blostomatidae spp.; Reduviidae spp. and Cimicidae spp.

[0054] Also included are adults and larvae of the order Acari (mites) such as Aceria tosichella Keifer (wheat curl mite); Petrobia latens Müller (brown wheat mite); spider mites and red mites in the family Tetranychidae, Panonychus ulmi Koch (European red mite); Tetranychus urticae Koch (two spotted spider mite); (T. mcdanieli McGregor (McDaniel mite); T. cinnabarinus Boisduval (carmine spider mite); T. turkestani Ugarov & Nikolski (strawberry spider mite); flat mites in the family Tenuipalpidae, Brevipalpus lewisi McGregor (citrus flat mite); rust and bud mites in the family Eriophyidae and other foliar feeding mites and mites important in human and animal health, i.e., dust mites in the family Epidermoptidae, follicle mites in the family Demodicidae, grain mites in the family Glycyphagidae, ticks in the order Ixodidae. Ixodes scapularis Say (deer tick); I. holocyclus Neumann (Australian paralysis tick); Dermacentor variabilis Say (American dog tick); Amblyomma americanum Linnaeus (lone star tick) and scab and itch mites in the families Psoroptidae, Pyemotidae and Sarcoptidae.

[0055] Insect pests of the order Thysanura are of interest, such as Lepisma saccharina Linnaeus (silverfish); Thermobia domestica Packard (firebrat).

[0056] Insect pests of interest include the superfamily of stink bugs and other related insects including but not limited to species belonging to the family Pentatomidae (Nezara viridula, Halyomorpha halys, Piezodorus guildini, Euschistus servus, Acrosternum hilare, Euschistus heros, Euschistus tristigmus, Acrosternum hilare, Dichelops furcatus, Dichelops melacanthus, and Bagrada hilaris (Bagrada Bug)), the family Plataspidae (Megacopta cribraria—Bean plataspid) and the family Cydnidae (Scaptocoris castanea—Root stink bug) and Lepidoptera species including but not limited to: diamond-back moth, e.g., Helicoverpa zea Boddie; soybean looper, e.g., Pseudoplusia includens Walker and velvet bean caterpillar e.g., Anticarsia gemmatalis Hübner.

### II. Target Sequences

[0057] As used herein, a “target sequence” or “target polynucleotide” comprises any sequence in the pest that one desires to reduce the level of expression thereof. In certain embodiments, decreasing the level of expression of the target sequence in the pest controls the pest. Non-limiting examples of target sequences include a polynucleotide set forth in SEQ ID NOS.: 1-53 or 107-407, or variants and fragments thereof, and complements thereof. As exemplified elsewhere herein, decreasing the level of expression of one or more of these target sequences in a Coleopteran plant pest or a Diabrotica plant pest controls the pest.

### III. Silencing Elements

[0058] By “silencing element” is intended a polynucleotide which when contacted with or ingested by a plant insect pest, is capable of reducing or eliminating the level or expression of a target polynucleotide or the polypeptide encoded thereby. Accordingly, it is to be understood that “silencing element,” as used herein, comprises polynucleotides such as RNA constructs, double stranded RNA (dsRNA), hairpin RNA, and sense and/or antisense RNA. In one embodiment, the silencing element employed can reduce or eliminate the expression level of the target sequence by influencing the level of the target RNA transcript or, alternatively, by influencing translation and thereby affecting the level of the encoded polypeptide. Methods to assay for functional silencing elements that are capable of reducing or eliminating the level of a sequence of interest are disclosed elsewhere herein. A single polynucleotide employed in the disclosed methods can comprise one or more silencing elements to the same or different target polynucleotides. The silencing element can be produced in vivo (i.e., in a host cell such as a plant or microorganism) or in vitro.

[0059] As used herein, the term “chimeric silencing element” refers to a single silencing element molecule that targets more than one gene, and results in the downregulation of more than one target gene. A chimeric silencing element may be processed in a cell or an organism into separate small RNAs through the RNA interference pathway, resulting in multiple small RNA silencing elements each targeting a single target gene; however the original chimeric silencing element would be a single molecule targeting more than one target genes.

[0060] In certain embodiments, a silencing element may comprise a chimeric silencing element molecule comprising two or more disclosed sequences or portions thereof. For example, the chimeric construction may be a hairpin or dsRNA as disclosed herein. A chimera may comprise two or more disclosed sequences or portions thereof. In one embodiment, a chimera contemplates two complementary sequences set forth herein, or portions thereof, having some degree of mismatch between the complementary sequences such that the two sequences are not perfect complements of one another. Providing at least two different sequences in a single silencing element may allow for targeting multiple genes using one silencing element and/or for example, one expression cassette. Targeting multiple genes may allow for slowing or reducing the possibility of resistance by the pest. In addition, providing multiple targeting ability in one expressed molecule may reduce the expression burden of the transformed plant or plant product, or provide topical treatments that are capable of targeting multiple hosts with one application.

[0061] In certain embodiments, while the silencing element controls pests, preferably the silencing element has no effect on the normal plant or plant part.

[0062] As discussed in further detail below, silencing elements can include, but are not limited to, a sense suppression element, an antisense suppression element, a double stranded RNA, a siRNA, an amiRNA, a miRNA, a multivalent RNA (See US patent application publication no. US2012184598 and US2011/0159586), or a hairpin suppression element. In an embodiment, silencing elements may comprise a chimera where two or more disclosed sequences or active fragments or variants, or complements thereof, are found in the same RNA molecule. In various embodiments, a disclosed sequence or active fragment or variant, or complement thereof, may be present as more than one copy in a DNA construct, silencing element, DNA molecule or RNA molecule. In a hairpin or dsRNA molecule, the location of a sense or antisense sequence in the molecule, for example, in which sequence is transcribed first or is located on a particular terminus of the RNA molecule, is not limiting to the disclosed sequences, and the dsRNA is not to be limited by disclosures herein of a particular location for such a sequence. Non-limiting examples of silencing elements that can be employed to decrease expression of these target sequences comprise fragments or variants of the sense or antisense sequence, or alternatively consists of the sense or antisense sequence, of a sequence set forth in SEQ ID NOS.: 1-53 or 107-407, or variants and fragments thereof, and complements thereof. The silencing element can further comprise additional sequences that advantageously effect transcription and/or the stability of a resulting transcript. For example, the silencing elements can comprise at least one thymine residue at the 3′ end. This can aid in stabilization. Thus, the silencing elements can have at least 1, 2, 3, 4, 5, 6, 7, 8, 9, 10 or more thymine residues at the 3′ end. As discussed in further detail below, enhancer suppressor elements can also be employed in conjunction with the silencing elements disclosed herein.

[0063] By “reduces” or “reducing” the expression level of a polynucleotide or a polypeptide encoded thereby is intended to mean, the polynucleotide or polypeptide level of the target sequence is statistically lower than the polynucleotide level or polypeptide level of the same target sequence in an appropriate control pest which is not exposed to (i.e., has not ingested or come into contact with) the silencing element. In particular embodiments, methods and/or compositions disclosed herein reduce the polynucleotide level and/or the polypeptide level of the target sequence in a plant insect pest to less than 95%, less than 90%, less than 80%, less than 70%, less than 60%, less than 50%, less than 40%, less than 30%, less than 20%, less than 10%, or less than 5% of the polynucleotide level, or the level of the polypeptide encoded thereby, of the same target sequence in an appropriate control pest. In some embodiments, a silencing element has substantial sequence identity to the target polynucleotide, typically greater than about 65% sequence identity, greater than about 85% sequence identity, about 90%, 91%, 92%, 93%, 94%, 95%, 96%, 97%, 98% or 99% sequence identity. Furthermore, a silencing element can be complementary to a portion of the target polynucleotide. Generally, sequences of at least 15, 16, 17, 18, 19, 20, 22, 25, 50, 100, 200, 300, 400, 450 continuous nucleotides or greater of the sequence set forth in any of SEQ ID NOS.: 1-53 or 107-407, or variants and fragments thereof, and complements thereof may be used. Methods to assay for the level of the RNA transcript, the level of the encoded polypeptide, or the activity of the polynucleotide or polypeptide are discussed elsewhere herein.

[0064] i. Sense Suppression Elements

[0065] As used herein, a “sense suppression element” comprises a polynucleotide designed to express an RNA molecule corresponding to at least a part of a target messenger RNA in the “sense” orientation. Expression of the RNA molecule comprising the sense suppression element reduces or eliminates the level of the target polynucleotide or the polypeptide encoded thereby. The polynucleotide comprising the sense suppression element may correspond to all or part of the sequence of the target polynucleotide, all or part of the 5′ and/or 3′ untranslated region of the target polynucleotide, all or part of the coding sequence of the target polynucleotide, or all or part of both the coding sequence and the untranslated regions of the target polynucleotide.

[0066] Typically, a sense suppression element has substantial sequence identity to the target polynucleotide, typically greater than about 65% sequence identity, greater than about 85% sequence identity, about 90%, 91%, 92%, 93%, 94%, 95%, 96%, 97%, 98% or 99% sequence identity. See, U.S. Pat. Nos. 5,283,184 and 5,034,323; herein incorporated by reference. The sense suppression element can be any length so long as it allows for the suppression of the targeted sequence. The sense suppression element can be, for example, 15, 16, 17, 18, 19, 20, 22, 25, 30, 50, 100, 150, 200, 250, 300, 350, 400, 450, 500, 600, 700, 900, 1000, 1100, 1200, 1300 nucleotides or longer of the target polynucleotides set forth in any of SEQ ID NOS.: 1-53 or 107-407, or variants and fragments thereof, and complements thereof. In other embodiments, the sense suppression element can be, for example, about 15-25, 19-35, 19-50, 25-100, 100-150, 150-200, 200-250, 250-300, 300-350, 350-400, 450-500, 500-550, 550-600, 600-650, 650-700, 700-750, 750-800, 800-850, 850-900, 900-950, 950-1000, 1000-1050, 1050-1100, 1100-1200, 1200-1300, 1300-1400, 1400-1500, 1500-1600, 1600-1700, 1700-1800 nucleotides or longer of the target polynucleotides set forth in any of SEQ ID NOS.: 1-53 or 107-407, or variants and fragments thereof, and complements thereof.

[0067] ii. Antisense Suppression Elements

[0068] As used herein, an “antisense suppression element” comprises a polynucleotide which is designed to express an RNA molecule complementary to all or part of a target messenger RNA. Expression of the antisense RNA suppression element reduces or eliminates the level of the target polynucleotide. The polynucleotide for use in antisense suppression may correspond to all or part of the complement of the sequence encoding the target polynucleotide, all or part of the complement of the 5′ and/or 3′ untranslated region of the target polynucleotide, all or part of the complement of the coding sequence of the target polynucleotide, or all or part of the complement of both the coding sequence and the untranslated regions of the target polynucleotide. In addition, the antisense suppression element may be fully complementary (i.e., 100% identical to the complement of the target sequence) or partially complementary (i.e., less than 100% identical to the complement of the target sequence) to the target polynucleotide. In certain embodiments, the antisense suppression element comprises at least 85%, 90%, 91%, 92%, 93%, 94%, 95%, 96%, 97%, 98%, or 99% sequence complementarity to the target polynucleotide. Antisense suppression may be used to inhibit the expression of multiple proteins in the same plant. See, for example, U.S. Pat. No. 5,942,657. Furthermore, the antisense suppression element can be complementary to a portion of the target polynucleotide. Generally, sequences of at least 15, 16, 17, 18, 19, 20, 22, 25, 50, 100, 200, 300, 400, 450 nucleotides or greater of the sequence set forth in any of SEQ ID NOS.: 1-53 or 107-407, or variants and fragments thereof, and complements thereof may be used. Methods for using antisense suppression to inhibit the expression of endogenous genes in plants are described, for example, in Liu et al (2002) Plant Physiol. 129:1732-1743 and U.S. Pat. No. 5,942,657, which is herein incorporated by reference.

[0069] iii. Double Stranded RNA Suppression Element

[0070] A “double stranded RNA silencing element” or “dsRNA,” comprises at least one transcript that is capable of forming a dsRNA either before or after ingestion by a plant insect pest. Thus, a “dsRNA silencing element” includes a dsRNA, a transcript or polyribonucleotide capable of forming a dsRNA or more than one transcript or polyribonucleotide capable of forming a dsRNA. “Double stranded RNA” or “dsRNA” refers to a polyribonucleotide structure formed either by a single self-complementary RNA molecule or a polyribonucleotide structure formed by the expression of at least two distinct RNA strands. The dsRNA molecule(s) employed in the disclosed methods and compositions mediate the reduction of expression of a target sequence, for example, by mediating RNA interference “RNAi” or gene silencing in a sequence-specific manner In various embodiments, the dsRNA is capable of reducing or eliminating the level or expression of a target polynucleotide or the polypeptide encoded thereby in a plant insect pest.

[0071] The dsRNA can reduce or eliminate the expression level of the target sequence by influencing the level of the target RNA transcript, by influencing translation and thereby affecting the level of the encoded polypeptide, or by influencing expression at the pre-transcriptional level (i.e., via the modulation of chromatin structure, methylation pattern, etc., to alter gene expression). For example, see Verdel et al. (2004) Science 303:672-676; Pal-Bhadra et al. (2004) Science 303:669-672; Allshire (2002) Science 297:1818-1819; Volpe et al. (2002) Science 297:1833-1837; Jenuwein (2002) Science 297:2215-2218; and Hall et al. (2002) Science 297:2232-2237. Methods to assay for functional dsRNA that are capable of reducing or eliminating the level of a sequence of interest are disclosed elsewhere herein. Accordingly, as used herein, the term “dsRNA” is meant to encompass other terms used to describe nucleic acid molecules that are capable of mediating RNA interference or gene silencing, including, for example, short-interfering RNA (siRNA), double-stranded RNA (dsRNA), micro-RNA (miRNA), hairpin RNA, short hairpin RNA (shRNA), post-transcriptional gene silencing RNA (ptgsRNA), and others.

[0072] In certain embodiments, at least one strand of the duplex or double-stranded region of the dsRNA shares sufficient sequence identity or sequence complementarity to the target polynucleotide to allow the dsRNA to reduce the level of expression of the target sequence. In some embodiments, a dsRNA has substantial sequence identity to the target polynucleotide, typically greater than about 65% sequence identity, greater than about 85% sequence identity, about 90%, 91%, 92%, 93%, 94%, 95%, 96%, 97%, 98% or 99% sequence identity. Furthermore, a dsRNA element can be complementary to a portion of the target polynucleotide. Generally, sequences of at least 15, 16, 17, 18, 19, 20, 22, 25, 50, 100, 200, 300, 400, 450 nucleotides or greater of the sequence set forth in any of SEQ ID NOS.: 1-53 or 107-407, or variants and fragments thereof, and complements thereof may be used. As used herein, the strand that is complementary to the target polynucleotide is the “antisense strand” and the strand homologous to the target polynucleotide is the “sense strand.”

[0073] In another embodiment, the dsRNA comprises a hairpin RNA. A hairpin RNA comprises an RNA molecule that is capable of folding back onto itself to form a double stranded structure. Multiple structures can be employed as hairpin elements. In certain embodiments, the dsRNA suppression element comprises a hairpin element which comprises in the following order, a first segment, a second segment, and a third segment, where the first and the third segment share sufficient complementarity to allow the transcribed RNA to form a double-stranded stem-loop structure.

[0074] The “second segment” of the hairpin comprises a “loop” or a “loop region.” These terms are used synonymously herein and are to be construed broadly to comprise any nucleotide sequence that confers enough flexibility to allow self-pairing to occur between complementary regions of a polynucleotide (i.e., segments 1 and 3 which form the stem of the hairpin). For example, in some embodiments, the loop region may be substantially single stranded and act as a spacer between the self-complementary regions of the hairpin stem-loop. In some embodiments, the loop region can comprise a random or nonsense nucleotide sequence and thus not share sequence identity to a target polynucleotide. In other embodiments, the loop region comprises a sense or an antisense RNA sequence or fragment thereof that shares identity to a target polynucleotide. See, for example, International Patent Publication No. WO 02/00904. In certain embodiments, the loop sequence can include an intron sequence, a sequence derived from an intron sequence, a sequence homologous to an intron sequence, or a modified intron sequence. The intron sequence can be one found in the same or a different species from which segments 1 and 3 are derived. In certain embodiments, the loop region can be optimized to be as short as possible while still providing enough intramolecular flexibility to allow the formation of the base-paired stem region. Accordingly, the loop sequence is generally less than 1000, 900, 800, 700, 600, 500, 400, 300, 200, 100, 50, 25, 20, 19, 18, 17, 16, 15, 10 nucleotides or less.

[0075] The “first” and the “third” segment of the hairpin RNA molecule comprise the base-paired stem of the hairpin structure. The first and the third segments are inverted repeats of one another and share sufficient complementarity to allow the formation of the base-paired stem region. In certain embodiments, the first and the third segments are fully complementary to one another. Alternatively, the first and the third segment may be partially complementary to each other so long as they are capable of hybridizing to one another to form a base-paired stem region. The amount of complementarity between the first and the third segment can be calculated as a percentage of the entire segment. Thus, the first and the third segment of the hairpin RNA generally share at least 50%, 60%, 70%, 80%, 85%, 90%, 91%, 92%, 93%, 94%, 95%, 96%, 97%, 98%, 99%, up to and including 100% complementarity.

[0076] The first and the third segment are at least about 1000, 500, 475, 450, 425, 400, 375, 350, 325, 300, 250, 225, 200, 175, 150, 125, 100, 75, 60, 50, 40, 30, 25, 22, 20, 19, 18, 17, 16, 15 or 10 nucleotides in length. In certain embodiments, the length of the first and/or the third segment is about 10-100 nucleotides, about 10 to about 75 nucleotides, about 10 to about 50 nucleotides, about 10 to about 40 nucleotides, about 10 to about 35 nucleotides, about 10 to about 30 nucleotides, about 10 to about 25 nucleotides, about 10 to about 19 nucleotides, about 10 to about 20 nucleotides, about 19 to about 50 nucleotides, about 50 nucleotides to about 100 nucleotides, about 100 nucleotides to about 150 nucleotides, about 100 nucleotides to about 300 nucleotides, about 150 nucleotides to about 200 nucleotides, about 200 nucleotides to about 250 nucleotides, about 250 nucleotides to about 300 nucleotides, about 300 nucleotides to about 350 nucleotides, about 350 nucleotides to about 400 nucleotides, about 400 nucleotide to about 500 nucleotides, about 600 nt, about 700 nt, about 800 nt, about 900 nt, about 1000 nt, about 1100 nt, about 1200 nt, 1300 nt, 1400 nt, 1500 nt, 1600 nt, 1700 nt, 1800 nt, 1900 nt, 2000 nt or longer. In other embodiments, the length of the first and/or the third segment comprises at least 10-19 nucleotides, 10-20 nucleotides; 19-35 nucleotides, 20-35 nucleotides; 30-45 nucleotides; 40-50 nucleotides; 50-100 nucleotides; 100-300 nucleotides; about 500-700 nucleotides; about 700-900 nucleotides; about 900-1100 nucleotides; about 1300-1500 nucleotides; about 1500-1700 nucleotides; about 1700-1900 nucleotides; about 1900-2100 nucleotides; about 2100-2300 nucleotides; or about 2300-2500 nucleotides. See, for example, International Publication No. WO 02/00904.

[0077] The disclosed hairpin molecules or double-stranded RNA molecules may have more than one disclosed sequence or active fragments or variants, or complements thereof, found in the same portion of the RNA molecule. For example, in a chimeric hairpin structure, the first segment of a hairpin molecule comprises two polynucleotide sections, each with a different disclosed sequence. For example, reading from one terminus of the hairpin, the first segment is composed of sequences from two separate genes (A followed by B). This first segment is followed by the second segment, the loop portion of the hairpin. The loop segment is followed by the third segment, where the complementary strands of the sequences in the first segment are found (B* followed by A*) in forming the stem-loop, hairpin structure, the stem contains SeqA-A* at the distal end of the stem and SeqB-B* proximal to the loop region.

[0078] In certain embodiments, the first and the third segment comprise at least 20 nucleotides having at least 85% complementary to the first segment. In still other embodiments, the first and the third segments which form the stem-loop structure of the hairpin comprise 3′ or 5′ overhang regions having unpaired nucleotide residues.

[0079] In certain embodiments, the sequences used in the first, the second, and/or the third segments comprise domains that are designed to have sufficient sequence identity to a target polynucleotide of interest and thereby have the ability to decrease the level of expression of the target polynucleotide. The specificity of the inhibitory RNA transcripts is therefore generally conferred by these domains of the silencing element. Thus, in some embodiments, the first, second and/or third segment of the silencing element comprise a domain having at least 10, at least 15, at least 19, at least 20, at least 21, at least 22, at least 23, at least 24, at least 25, at least 30, at least 40, at least 50, at least 100, at least 200, at least 300, at least 500, at least 1000, or more than 1000 nucleotides that share sufficient sequence identity to the target polynucleotide to allow for a decrease in expression levels of the target polynucleotide when expressed in an appropriate cell. In other embodiments, the domain is between about 15 to 50 nucleotides, about 19-35 nucleotides, about 20-35 nucleotides, about 25-50 nucleotides, about 19 to 75 nucleotides, about 20 to 75 nucleotides, about 40-90 nucleotides about 15-100 nucleotides, 10-100 nucleotides, about 10 to about 75 nucleotides, about 10 to about 50 nucleotides, about 10 to about 40 nucleotides, about 10 to about 35 nucleotides, about 10 to about 30 nucleotides, about 10 to about 25 nucleotides, about 10 to about 20 nucleotides, about 10 to about 19 nucleotides, about 50 nucleotides to about 100 nucleotides, about 100 nucleotides to about 150 nucleotides, about 150 nucleotides to about 200 nucleotides, about 200 nucleotides to about 250 nucleotides, about 250 nucleotides to about 300 nucleotides, about 300 nucleotides to about 350 nucleotides, about 350 nucleotides to about 400 nucleotides, about 400 nucleotide to about 500 nucleotides or longer. In other embodiments, the length of the first and/or the third segment comprises at least 10-20 nucleotides, at least 10-19 nucleotides, 20-35 nucleotides, 30-45 nucleotides, 40-50 nucleotides, 50-100 nucleotides, or about 100-300 nucleotides.

[0080] In certain embodiments, a domain of the first, the second, and/or the third segment has 100% sequence identity to the target polynucleotide. In other embodiments, the domain of the first, the second and/or the third segment having homology to the target polynucleotide have at least 50%, 60%, 70%, 80%, 85%, 90%, 91%, 92%, 93%, 94%, 95%, 96%, 97%, 98%, 99%, or greater sequence identity to a region of the target polynucleotide. The sequence identity of the domains of the first, the second and/or the third segments complementary to a target polynucleotide need only be sufficient to decrease expression of the target polynucleotide of interest. See, for example, Chuang and Meyerowitz (2000) Proc. Natl. Acad. Sci. USA 97:4985-4990; Stoutjesdijk et al. (2002) Plant Physiol. 129:1723-1731; Waterhouse and Helliwell (2003) Nat. Rev. Genet. 4:29-38; Pandolfini et al. BMC Biotechnology 3:7, and U.S. Patent Publication No. 20030175965; each of which is herein incorporated by reference. A transient assay for the efficiency of hpRNA constructs to silence gene expression in vivo has been described by Panstruga et al. (2003) Mol. Biol. Rep. 30:135-140.

[0081] The amount of complementarity shared between the first, second, and/or third segment and the target polynucleotide or the amount of complementarity shared between the first segment and the third segment (i.e., the stem of the hairpin structure) may vary depending on the organism in which gene expression is to be controlled. Some organisms or cell types may require exact pairing or 100% identity, while other organisms or cell types may tolerate some mismatching. In some cells, for example, a single nucleotide mismatch in the targeting sequence abrogates the ability to suppress gene expression. In these cells, the disclosed suppression cassettes can be used to target the suppression of mutant genes, for example, oncogenes whose transcripts comprise point mutations and therefore they can be specifically targeted using the methods and compositions disclosed herein without altering the expression of the remaining wild-type allele. In other organisms, holistic sequence variability may be tolerated as long as some 22 nt region of the sequence is represented in 100% homology between target polynucleotide and the suppression cassette.

[0082] Any region of the target polynucleotide can be used to design a domain of the silencing element that shares sufficient sequence identity to allow expression of the hairpin transcript to decrease the level of the target polynucleotide. For instance, a domain may be designed to share sequence identity to the 5′ untranslated region of the target polynucleotide(s), the 3′ untranslated region of the target polynucleotide(s), exonic regions of the target polynucleotide(s), intronic regions of the target polynucleotide(s), and any combination thereof. In certain embodiments, a domain of the silencing element shares sufficient identity, homology, or is complementary to at least about 15, 16, 17, 18, 19, 20, 22, 25 or 30 consecutive nucleotides from about nucleotides 1-50, 25-75, 75-125, 50-100, 125-175, 175-225, 100-150, 150-200, 200-250, 225-275, 275-325, 250-300, 325-375, 375-425, 300-350, 350-400, 425-475, 400-450, 475-525, 450-500, 525-575, 575-625, 550-600, 625-675, 675-725, 600-650, 625-675, 675-725, 650-700, 725-825, 825-875, 750-800, 875-925, 925-975, 850-900, 925-975, 975-1025, 950-1000, 1000-1050, 1025-1075, 1075-1125, 1050-1100, 1125-1175, 1100-1200, 1175-1225, 1225-1275, 1200-1300, 1325-1375, 1375-1425, 1300-1400, 1425-1475, 1475-1525, 1400-1500, 1525-1575, 1575-1625, 1625-1675, 1675-1725, 1725-1775, 1775-1825, 1825-1875, 1875-1925, 1925-1975, 1975-2025, 2025-2075, 2075-2125, 2125-2175, 2175-2225, 1500-1600, 1600-1700, 1700-1800, 1800-1900, 1900-2000 of the target sequence. In some instances to optimize the siRNA sequences employed in the hairpin, the synthetic oligodeoxyribonucleotide/RNAse H method can be used to determine sites on the target mRNA that are in a conformation that is susceptible to RNA silencing. See, for example, Vickers et al. (2003) J. Biol. Chem 278:7108-7118 and Yang et al. (2002) Proc. Natl. Acad. Sci. USA 99:9442-9447, herein incorporated by reference. These studies indicate that there is a significant correlation between the RNase-H-sensitive sites and sites that promote efficient siRNA-directed mRNA degradation.

[0083] The hairpin silencing element may also be designed such that the sense sequence or the antisense sequence do not correspond to a target polynucleotide. In this embodiment, the sense and antisense sequence flank a loop sequence that comprises a nucleotide sequence corresponding to all or part of the target polynucleotide. Thus, in this embodiment it is the loop region that determines the specificity of the RNA interference. See, for example, WO 02/00904.

[0084] In addition, transcriptional gene silencing (TGS) may be accomplished through use of a hairpin suppression element where the inverted repeat of the hairpin shares sequence identity with the promoter region of a target polynucleotide to be silenced. See, for example, Aufsatz et al. (2002) PNAS 99 (Suppl. 4):16499-16506 and Mette et al. (2000) EMBO J 19(19):5194-5201.

[0085] In other embodiments, the silencing element can comprise a small RNA (sRNA). sRNAs can comprise both micro RNA (miRNA) and short-interfering RNA (siRNA) (Meister and Tuschl (2004) Nature 431:343-349 and Bonetta et al. (2004) Nature Methods 1:79-86). miRNAs are regulatory agents comprising about 19 to about 24 ribonucleotides in length which are highly efficient at inhibiting the expression of target polynucleotides. See, for example Javier et al. (2003) Nature 425: 257-263. For miRNA interference, the silencing element can be designed to express a dsRNA molecule that forms a hairpin structure or partially base-paired structure containing a 19, 20, 21, 22, 23, 24 or 25 nucleotide sequence that is complementary to the target polynucleotide of interest. The miRNA can be synthetically made, or transcribed as a longer RNA which is subsequently cleaved to produce the active miRNA. Specifically, the miRNA can comprise 19 nucleotides of the sequence having homology to a target polynucleotide in sense orientation and 19 nucleotides of a corresponding antisense sequence that is complementary to the sense sequence. The miRNA can be an “artificial miRNA” or “amiRNA” which comprises a miRNA sequence that is synthetically designed to silence a target sequence.

[0086] When expressing an miRNA the final (mature) miRNA is present in a duplex in a precursor backbone structure, the two strands being referred to as the miRNA (the strand that will eventually base pair with the target) and miRNA*(star sequence). It has been demonstrated that miRNAs can be transgenically expressed and target genes of interest for efficient silencing (Highly specific gene silencing by artificial microRNAs in Arabidopsis Schwab R, Ossowski S, Riester M, Warthmann N, Weigel D. Plant Cell. 2006 May; 18(5):1121-33. Epub 2006 Mar. 10; and Expression of artificial microRNAs in transgenic Arabidopsis thaliana confers virus resistance. Niu Q W, Lin S S, Reyes J L, Chen K C, Wu H W, Yeh S D, Chua N H. Nat Biotechnol. 2006 November; 24(11):1420-8. Epub 2006 Oct. 22. Erratum in: Nat Biotechnol. 2007 February; 25(2):254.).

[0087] The silencing element for miRNA interference comprises a miRNA primary sequence. The miRNA primary sequence comprises a DNA sequence having the miRNA and star sequences separated by a loop as well as additional sequences flanking this region that are important for processing. When expressed as an RNA, the structure of the primary miRNA is such as to allow for the formation of a hairpin RNA structure that can be processed into a mature miRNA. In some embodiments, the miRNA backbone comprises a genomic or cDNA miRNA precursor sequence, wherein said sequence comprises a native primary in which a heterologous (artificial) mature miRNA and star sequence are inserted.

[0088] As used herein, a “star sequence” is the sequence within a miRNA precursor backbone that is complementary to the miRNA and forms a duplex with the miRNA to form the stem structure of a hairpin RNA. In some embodiments, the star sequence can comprise less than 100% complementarity to the miRNA sequence. Alternatively, the star sequence can comprise at least 99%, 98%, 97%, 96%, 95%, 90%, 85%, 80% or lower sequence complementarity to the miRNA sequence as long as the star sequence has sufficient complementarity to the miRNA sequence to form a double stranded structure. In still further embodiments, the star sequence comprises a sequence having 1, 2, 3, 4, 5 or more mismatches with the miRNA sequence and still has sufficient complementarity to form a double stranded structure with the miRNA sequence resulting in production of miRNA and suppression of the target sequence.

[0089] The miRNA precursor backbones can be from any plant. In some embodiments, the miRNA precursor backbone is from a monocot. In other embodiments, the miRNA precursor backbone is from a dicot. In further embodiments, the backbone is from maize or soybean. MicroRNA precursor backbones have been described previously. For example, US20090155910A1 (WO 2009/079532) discloses the following soybean miRNA precursor backbones: 156c, 159, 166b, 168c, 396b and 398b, and US20090155909A1 (WO 2009/079548) discloses the following maize miRNA precursor backbones: 159c, 164h, 168a, 169r, and 396h.

[0090] Thus, the primary miRNA can be altered to allow for efficient insertion of heterologous miRNA and star sequences within the miRNA precursor backbone. In such instances, the miRNA segment and the star segment of the miRNA precursor backbone are replaced with the heterologous miRNA and the heterologous star sequences, designed to target any sequence of interest, using a PCR technique and cloned into an expression construct. It is recognized that there could be alterations to the position at which the artificial miRNA and star sequences are inserted into the backbone. Detailed methods for inserting the miRNA and star sequence into the miRNA precursor backbone are described in, for example, US Patent Applications 20090155909A1 and US20090155910A1.

[0091] When designing a miRNA sequence and star sequence, various design choices can be made. See, for example, Schwab R, et al. (2005) Dev Cell 8: 517-27. In non-limiting embodiments, the miRNA sequences disclosed herein can have a “U” at the 5′-end, a “C” or “G” at the 19th nucleotide position, and an “A” or “U” at the 10th nucleotide position. In other embodiments, the miRNA design is such that the miRNA have a high free delta-G as calculated using the ZipFold algorithm (Markham, N. R. & Zuker, M. (2005) Nucleic Acids Res. 33: W577-W581.) Optionally, a one base pair change can be added within the 5′ portion of the miRNA so that the sequence differs from the target sequence by one nucleotide.

[0092] The methods and compositions disclosed herein employ DNA constructs that when transcribed “form” one or more silencing elements, such as a dsRNA molecule. The methods and compositions also may comprise a host cell comprising the DNA construct encoding a silencing element. In another embodiment, the methods and compositions also may comprise a transgenic plant comprising the DNA construct encoding one or more silencing elements. Accordingly, the heterologous polynucleotide being expressed need not form the dsRNA by itself, but can interact with other sequences in the plant cell or in the pest gut after ingestion to allow the formation of the dsRNA. For example, a chimeric polynucleotide that can selectively silence the target polynucleotide can be generated by expressing a chimeric construct comprising the target sequence for a miRNA or siRNA to a sequence corresponding to all or part of the gene or genes to be silenced. In this embodiment, the dsRNA is “formed” when the target for the miRNA or siRNA interacts with the miRNA present in the cell. The resulting dsRNA can then reduce the level of expression of the gene or genes to be silenced. See, for example, US Application Publication 2007-0130653, entitled “Methods and Compositions for Gene Silencing”. The construct can be designed to have a target for an endogenous miRNA or alternatively, a target for a heterologous and/or synthetic miRNA can be employed in the construct. If a heterologous and/or synthetic miRNA is employed, it can be introduced into the cell on the same nucleotide construct as the chimeric polynucleotide or on a separate construct. As discussed elsewhere herein, any method can be used to introduce the construct comprising the heterologous miRNA.

### IV. Variants and Fragments

[0093] By “fragment” is intended a portion of the polynucleotide or a portion of the amino acid sequence and hence protein encoded thereby. Fragments of a polynucleotide may encode protein fragments that retain the biological activity of the native protein. Alternatively, fragments of a polynucleotide that are useful as a silencing element do not need to encode fragment proteins that retain biological activity. Thus, fragments of a nucleotide sequence may range from at least about 10, about 15, about 16, about 17, about 18, about 19, nucleotides, about 20 nucleotides, about 22 nucleotides, about 50 nucleotides, about 75 nucleotides, about 100 nucleotides, 200 nucleotides, 300 nucleotides, 400 nucleotides, 500 nucleotides, 600 nucleotides, 700 nucleotides and up to and including one nucleotide less than the full-length polynucleotide employed. Alternatively, fragments of a nucleotide sequence may range from 1-50, 25-75, 75-125, 50-100, 125-175, 175-225, 100-150, 100-300, 150-200, 200-250, 225-275, 275-325, 250-300, 325-375, 375-425, 300-350, 350-400, 425-475, 400-450, 475-525, 450-500, 525-575, 575-625, 550-600, 625-675, 675-725, 600-650, 625-675, 675-725, 650-700, 725-825, 825-875, 750-800, 875-925, 925-975, 850-900, 925-975, 975-1025, 950-1000, 1000-1050, 1025-1075, 1075-1125, 1050-1100, 1125-1175, 1100-1200, 1175-1225, 1225-1275, 1200-1300, 1325-1375, 1375-1425, 1300-1400, 1425-1475, 1475-1525, 1400-1500, 1525-1575, 1575-1625, 1625-1675, 1675-1725, 1725-1775, 1775-1825, 1825-1875, 1875-1925, 1925-1975, 1975-2025, 2025-2075, 2075-2125, 2125-2175, 2175-2225, 1500-1600, 1600-1700, 1700-1800, 1800-1900, 1900-2000 of any one of SEQ ID NOS.: 1-53 or 107-407, or variants and fragments thereof, and complements thereof. Methods to assay for the activity of a desired silencing element are described elsewhere herein.

[0094] “Variants” is intended to mean substantially similar sequences. For polynucleotides, a variant comprises a deletion and/or addition of one or more nucleotides at one or more internal sites within the native polynucleotide and/or a substitution of one or more nucleotides at one or more sites in the native polynucleotide. A variant of a polynucleotide that is useful as a silencing element will retain the ability to reduce expression of the target polynucleotide and, in some embodiments, thereby control a plant insect pest of interest. As used herein, a “native” polynucleotide or polypeptide comprises a naturally occurring nucleotide sequence or amino acid sequence, respectively. For polynucleotides, conservative variants include those sequences that, because of the degeneracy of the genetic code, encode the amino acid sequence of one of the disclosed polypeptides. Variant polynucleotides also include synthetically derived polynucleotide, such as those generated, for example, by using site-directed mutagenesis, but continue to retain the desired activity. Generally, variants of a particular disclosed polynucleotide (i.e., a silencing element) will have at least about 40%, 45%, 50%, 55%, 60%, 65%, 70%, 75%, 80%, 85%, 90%, 91%, 92%, 93%, 94%, 95%, 96%, 97%, 98%, 99% or more sequence identity to that particular polynucleotide as determined by sequence alignment programs and parameters described elsewhere herein.

[0095] Variants of a particular disclosed polynucleotide (i.e., the reference polynucleotide) can also be evaluated by comparison of the percent sequence identity between the polypeptide encoded by a variant polynucleotide and the polypeptide encoded by the reference polynucleotide. Percent sequence identity between any two polypeptides can be calculated using sequence alignment programs and parameters described elsewhere herein. Where any given pair of disclosed polynucleotides employed is evaluated by comparison of the percent sequence identity shared by the two polypeptides they encode, the percent sequence identity between the two encoded polypeptides is at least about 40%, 45%, 50%, 55%, 60%, 65%, 70%, 75%, 80%, 85%, 90%, 91%, 92%, 93%, 94%, 95%, 96%, 97%, 98%, 99% or more sequence identity.

[0096] “Percent (%) sequence identity” with respect to a reference sequence (subject) is determined as the percentage of amino acid residues or nucleotides in a candidate sequence (query) that are identical with the respective amino acid residues or nucleotides in the reference sequence, after aligning the sequences and introducing gaps, if necessary, to achieve the maximum percent sequence identity, and not considering any amino acid conservative substitutions as part of the sequence identity. Alignment for purposes of determining percent sequence identity can be achieved in various ways that are within the skill in the art, for instance, using publicly available computer software such as BLAST, BLAST-2. Those skilled in the art can determine appropriate parameters for aligning sequences, including any algorithms needed to achieve maximal alignment over the full length of the sequences being compared. The percent identity between the two sequences is a function of the number of identical positions shared by the sequences (e.g., percent identity of query sequence=number of identical positions between query and subject sequences/total number of positions of query sequence×100).

[0097] A method is further provided for identifying one or more silencing elements from the target polynucleotides set forth in SEQ ID NOS.: 1-53 or 107-407, or variants and fragments thereof, and complements thereof. Such methods comprise obtaining a candidate fragment of any one of SEQ ID NOS.: 1-53 or 107-407, or variants and fragments thereof, and complements thereof, which is of sufficient length to act as a silencing element and thereby reduce the expression of the target polynucleotide and/or control a desired pest; expressing said candidate polynucleotide fragment in an appropriate expression cassette to produce a candidate silencing element and determining if said candidate polynucleotide fragment has the activity of a silencing element and thereby reduce the expression of the target polynucleotide and/or controls a desired pest. Methods of identifying such candidate fragments based on the desired pathway for suppression, in light of the teachings provided herein, are known. For example, various bioinformatics programs can be employed to identify the region of the target polynucleotides that could be exploited to generate a silencing element. See, for example, Elbahir et al. (2001) Genes and Development 15:188-200, Schwartz et al. (2003) Cell 115:199-208, Khvorova et al. (2003) Cell 115:209-216. See also, siRNA at Whitehead (jura.wi.mit.edu/bioc/siRNAext/) which calculates the binding energies for both sense and antisense siRNAs. See, also genscript.com/ssl-bin/app/rnai?op=known; Block-iT™ RNAi designer from Invitrogen and GenScript siRNA Construct Builder. In various aspects, it is to be understand that the term “ . . . SEQ ID NOS.: 1-53 or 107-407, or variants or fragments thereof, or complements thereof . . . ” is intended to mean that the disclosed sequences comprise SEQ ID NOS.: 1-53 or 107-407, and/or fragments of SEQ ID NOS.: 1-53 or 107-407, and/or variants of SEQ ID NOS.: 1-53 or 107-407, and/or the complements of SEQ ID NOS.: 1-53 or 107-407, the variants of SEQ ID NOS.: 1-53 or 107-407, and/or the fragments of SEQ ID NOS.: 1-53 or 107-407, individually (or) or inclusive of some or all listed sequences.

### V. DNA Constructs

[0098] The use of the term “polynucleotide” is not intended to be limiting to polynucleotides comprising DNA. Those of ordinary skill in the art will recognize that polynucleotides can comprise ribonucleotides and combinations of ribonucleotides and deoxyribonucleotides. Such deoxyribonucleotides and ribonucleotides include both naturally occurring molecules and synthetic analogues. The disclosed polynucleotides also encompass all forms of sequences including, but not limited to, single-stranded forms, double-stranded forms, hairpins, stem-and-loop structures, and the like.

[0099] The polynucleotide encoding the silencing element or in certain embodiments employed in the disclosed methods and compositions can be provided in expression cassettes for expression in a plant or organism of interest. It is recognized that multiple silencing elements including multiple identical silencing elements, multiple silencing elements targeting different regions of the target sequence, or multiple silencing elements from different target sequences can be used. In this embodiment, it is recognized that each silencing element may be encoded by a single or separate cassette, DNA construct, or vector. As discussed, any means of providing the silencing element is contemplated. A plant or plant cell can be transformed with a single cassette comprising DNA encoding one or more silencing elements or separate cassettes encoding a silencing element can be used to transform a plant or plant cell or host cell. Likewise, a plant transformed with one component can be subsequently transformed with the second component. One or more DNA constructs encoding silencing elements can also be brought together by sexual crossing. That is, a first plant comprising one component is crossed with a second plant comprising the second component. Progeny plants from the cross will comprise both components.

[0100] The expression cassette can include 5′ and 3′ regulatory sequences operably linked to the polynucleotide of the invention. “Operably linked” is intended to mean a functional linkage between two or more elements. For example, an operable linkage between a polynucleotide of the invention and a regulatory sequence (i.e., a promoter) is a functional link that allows for expression of the polynucleotide disclosed herein. Operably linked elements may be contiguous or non-contiguous. When used to refer to the joining of two protein coding regions, by operably linked is intended that the coding regions are in the same reading frame. The cassette may additionally contain at least one additional polynucleotide to be cotransformed into the organism. Alternatively, the additional polypeptide(s) can be provided on multiple expression cassettes. Expression cassettes can be provided with a plurality of restriction sites and/or recombination sites for insertion of the polynucleotide to be under the transcriptional regulation of the regulatory regions. The expression cassette may additionally contain selectable marker genes.

[0101] The expression cassette can include in the 5′-3′ direction of transcription, a transcriptional and translational initiation region (i.e., a promoter), a polynucleotide encoding the silencing element employed in the methods and compositions of the invention, and a transcriptional and translational termination region (i.e., termination region) functional in plants. In other embodiment, the double stranded RNA is expressed from a suppression cassette. Such a cassette can comprise two convergent promoters that drive transcription of an operably linked silencing element. “Convergent promoters” refers to promoters that are oriented on either terminus of the operably linked polynucleotide encoding the silencing element such that each promoter drives transcription of the silencing element in opposite directions, yielding two transcripts. In such embodiments, the convergent promoters allow for the transcription of the sense and anti-sense strand and thus allow for the formation of a dsRNA. Such a cassette may also comprise two divergent promoters that drive transcription of one or more operably linked polynucleotides encoding the silencing elements. “Divergent promoters” refers to promoters that are oriented in opposite directions of each other, driving transcription of the one or more polynucleotides encoding the silencing elements in opposite directions. In such embodiments, the divergent promoters allow for the transcription of the sense and antisense strands and allow for the formation of a dsRNA. In such embodiments, the divergent promoters also allow for the transcription of at least two separate hairpin RNAs. In another embodiment, one cassette comprising two or more polynucleotides encoding the silencing elements under the control of two separate promoters in the same orientation is present in a construct. In another embodiment, two or more individual cassettes, each comprising at least one polynucleotide encoding the silencing element under the control of a promoter, are present in a construct in the same orientation.

[0102] The regulatory regions (i.e., promoters, transcriptional regulatory regions, and translational termination regions) and/or the polynucleotides disclosed herein may be native/analogous to the host cell or to each other. Alternatively, the regulatory regions and/or the polynucleotide disclosed herein may be heterologous to the host cell or to each other. As used herein, “heterologous” in reference to a sequence is a sequence that originates from a foreign species, or, if from the same species, is substantially modified from its native form in composition and/or genomic locus by deliberate human intervention. For example, a promoter operably linked to a heterologous polynucleotide is from a species different from the species from which the polynucleotide was derived, or, if from the same/analogous species, one or both are substantially modified from their original form and/or genomic locus, or the promoter is not the native promoter for the operably linked polynucleotide. As used herein, a chimeric gene comprises a coding sequence operably linked to a transcription initiation region that is heterologous to the coding sequence.

[0103] The termination region may be native with the transcriptional initiation region, may be native with the operably linked polynucleotide encoding the silencing element, may be native with the plant host, or may be derived from another source (i.e., foreign or heterologous) to the promoter, the polynucleotide encoding the silencing element, the plant host, or any combination thereof. Convenient termination regions are available from the Ti-plasmid of A. tumefaciens, such as the octopine synthase and nopaline synthase termination regions. See also Guerineau et al. (1991) Mol. Gen. Genet. 262:141-144; Proudfoot (1991) Cell 64:671-674; Sanfacon et al. (1991) Genes Dev. 5:141-149; Mogen et al. (1990) Plant Cell 2:1261-1272; Munroe et al. (1990) Gene 91:151-158; Ballas et al. (1989) Nucleic Acids Res. 17:7891-7903; and Joshi et al. (1987) Nucleic Acids Res. 15:9627-9639.

[0104] Additional sequence modifications are known to enhance gene expression in a cellular host. These include elimination of sequences encoding spurious polyadenylation signals, exon-intron splice site signals, transposon-like repeats, and other such well-characterized sequences that may be deleterious to gene expression. The G-C content of the sequence may be adjusted to levels average for a given cellular host, as calculated by reference to known genes expressed in the host cell. When possible, the sequence is modified to avoid predicted hairpin secondary mRNA structures.

[0105] In preparing the expression cassette, the various DNA fragments may be manipulated, so as to provide for the DNA sequences in the proper orientation and, as appropriate, in the proper reading frame. Toward this end, adapters or linkers may be employed to join the DNA fragments or other manipulations may be involved to provide for convenient restriction sites, removal of superfluous DNA, removal of restriction sites, or the like. For this purpose, in vitro mutagenesis, primer repair, restriction, annealing, resubstitutions, e.g., transitions and transversions, may be involved.

[0106] A number of promoters can be used in the practice of the invention. The promoters can be selected based on the desired outcome. The nucleic acids can be combined with constitutive, tissue-preferred, inducible, or other promoters for expression in the host organism.

[0107] Such constitutive promoters include, for example, the core promoter of the Rsyn7 promoter and other constitutive promoters disclosed in WO 99/43838 and U.S. Pat. No. 6,072,050; the core CaMV 35S promoter (Odell et al. (1985) Nature 313:810-812); rice actin (McElroy et al. (1990) Plant Cell 2:163-171); ubiquitin (Christensen et al. (1989) Plant Mol. Biol. 12:619-632 and Christensen et al. (1992) Plant Mol. Biol. 18:675-689); pEMU (Last et al. (1991) Theor. Appl. Genet. 81:581-588); MAS (Velten et al. (1984) EMBO J. 3:2723-2730); ALS promoter (U.S. Pat. No. 5,659,026), and the like. Other constitutive promoters include, for example, U.S. Pat. Nos. 5,608,149; 5,608,144; 5,604,121; 5,569,597; 5,466,785; 5,399,680; 5,268,463; 5,608,142; and 6,177,611.

[0108] Depending on the desired outcome, it may be beneficial to express the gene from an inducible promoter. An inducible promoter, for instance, a pathogen-inducible promoter could also be employed. Such promoters include those from pathogenesis-related proteins (PR proteins), which are induced following infection by a pathogen; e.g., PR proteins, SAR proteins, beta-1,3-glucanase, chitinase, etc. See, for example, Redolfi et al. (1983) Neth. J. Plant Pathol. 89:245-254; Uknes et al. (1992) Plant Cell 4:645-656; and Van Loon (1985) Plant Mol. Virol. 4:111-116. See also WO 99/43819.

[0109] Additionally, as pathogens find entry into plants through wounds or insect damage, a wound-inducible promoter may be used in the constructions of the invention. Such wound-inducible promoters include potato proteinase inhibitor (pin II) gene (Ryan (1990) Ann. Rev. Phytopath. 28:425-449; Duan et al. (1996) Nature Biotechnology 14:494-498); wun1 and wun2, U.S. Pat. No. 5,428,148; win1 and win2 (Stanford et al. (1989) Mol. Gen. Genet. 215:200-208); systemin (McGurl et al. (1992) Science 225:1570-1573); WIP1 (Rohmeier et al. (1993) Plant Mol. Biol. 22:783-792; Eckelkamp et al. (1993) FEBS Letters 323:73-76); MPI gene (Corderok et al. (1994) Plant J. 6(2):141-150); and the like.

[0110] Additionally, pathogen-inducible promoters may be employed in the methods and nucleotide constructs of the embodiments. Such pathogen-inducible promoters include those from pathogenesis-related proteins (PR proteins), which are induced following infection by a pathogen; e.g., PR proteins, SAR proteins, beta-1,3-glucanase, chitinase, etc. See, for example, Redolfi et al. (1983) Neth. J. Plant Pathol. 89: 245-254; Uknes et al. (1992) Plant Cell 4: 645-656; and Van Loon (1985) Plant Mol. Virol. 4: 111-116. See also WO 99/43819.

[0111] Of interest are promoters that are expressed locally at or near the site of pathogen infection. See, for example, Marineau et al. (1987) Plant Mol. Biol. 9:335-342; Matton et al. (1989) Molecular Plant-Microbe Interactions 2:325-331; Somsisch et al. (1986) Proc. Natl. Acad. Sci. USA 83:2427-2430; Somsisch et al. (1988) Mol. Gen. Genet. 2:93-98; and Yang (1996) Proc. Natl. Acad. Sci. USA 93:14972-14977. See also, Chen et al. (1996) Plant J. 10:955-966; Zhang et al. (1994) Proc. Natl. Acad. Sci. USA 91:2507-2511; Warner et al. (1993) Plant J. 3:191-201; Siebertz et al. (1989) Plant Cell 1:961-968; U.S. Pat. No. 5,750,386 (nematode-inducible). Of particular interest is the inducible promoter for the maize PRms gene, whose expression is induced by the pathogen Fusarium moniliforme (see, for example, Cordero et al. (1992) Physiol. Mol. Plant Path. 41:189-200).

[0112] Chemical-regulated promoters can be used to modulate the expression of a gene in a plant through the application of an exogenous chemical regulator. Depending upon the objective, the promoter may be a chemical-inducible promoter, where application of the chemical induces gene expression, or a chemical-repressible promoter, where application of the chemical represses gene expression. Chemical-inducible promoters are known in the art and include, but are not limited to, the maize In2-2 promoter, which is activated by benzenesulfonamide herbicide safeners, the maize GST promoter, which is activated by hydrophobic electrophilic compounds that are used as pre-emergent herbicides, and the tobacco PR-1a promoter, which is activated by salicylic acid. Other chemical-regulated promoters of interest include steroid-responsive promoters (see, for example, the glucocorticoid-inducible promoter in Schena et al. (1991) Proc. Natl. Acad. Sci. USA 88:10421-10425 and McNellis et al. (1998) Plant J. 14(2):247-257) and tetracycline-inducible and tetracycline-repressible promoters (see, for example, Gatz et al. (1991) Mol. Gen. Genet. 227:229-237, and U.S. Pat. Nos. 5,814,618 and 5,789,156).

[0113] Tissue-preferred promoters can be utilized to target enhanced expression within a particular plant tissue. Tissue-preferred promoters include Yamamoto et al. (1997) Plant J. 12(2):255-265; Kawamata et al. (1997) Plant Cell Physiol. 38(7):792-803; Hansen et al. (1997) Mol. Gen Genet. 254(3):337-343; Russell et al. (1997) Transgenic Res. 6(2):157-168; Rinehart et al. (1996) Plant Physiol. 112(3):1331-1341; Van Camp et al. (1996) Plant Physiol. 112(2):525-535; Canevascini et al. (1996) Plant Physiol. 112(2):513-524; Yamamoto et al. (1994) Plant Cell Physiol. 35(5):773-778; Lam (1994) Results Probl. Cell Differ. 20:181-196; Orozco et al. (1993) Plant Mol Biol. 23(6): 1129-1138; Matsuoka et al. (1993) Proc Natl. Acad. Sci. USA 90(20):9586-9590; and Guevara-Garcia et al. (1993) Plant J. 4(3):495-505. Such promoters can be modified, if necessary, for weak expression.

[0114] Leaf-preferred promoters are known in the art. See, for example, Yamamoto et al. (1997) Plant J. 12(2):255-265; Kwon et al. (1994) Plant Physiol. 105:357-67; Yamamoto et al. (1994) Plant Cell Physiol. 35(5):773-778; Gotor et al. (1993) Plant J. 3:509-18; Orozco et al. (1993) Plant Mol. Biol. 23(6):1129-1138; and Matsuoka et al. (1993) Proc. Natl. Acad. Sci. USA 90(20):9586-9590.

[0115] Root-preferred promoters are known and can be selected from the many available from the literature or isolated de novo from various compatible species. See, for example, Hire et al. (1992) Plant Mol. Biol. 20(2):207-218 (soybean root-specific glutamine synthetase gene); Keller and Baumgartner (1991) Plant Cell 3(10):1051-1061 (root-specific control element in the GRP 1.8 gene of French bean); Sanger et al. (1990) Plant Mol. Biol. 14(3):433-443 (root-specific promoter of the mannopine synthase (MAS) gene of Agrobacterium tumefaciens); and Miao et al. (1991) Plant Cell 3(1):11-22 (full-length cDNA clone encoding cytosolic glutamine synthetase (GS), which is expressed in roots and root nodules of soybean). See also Bogusz et al. (1990) Plant Cell 2(7):633-641, where two root-specific promoters isolated from hemoglobin genes from the nitrogen-fixing nonlegume Parasponia andersonii and the related non-nitrogen-fixing nonlegume Trema tomentosa are described. The promoters of these genes were linked to a β-glucuronidase reporter gene and introduced into both the nonlegume Nicotiana tabacum and the legume Lotus corniculatus, and in both instances root-specific promoter activity was preserved. Leach and Aoyagi (1991) describe their analysis of the promoters of the highly expressed rolC and rolD root-inducing genes of Agrobacterium rhizogenes (see Plant Science (Limerick) 79(1):69-76). They concluded that enhancer and tissue-preferred DNA determinants are dissociated in those promoters. Teeri et al. (1989) used gene fusion to lacZ to show that the Agrobacterium T-DNA gene encoding octopine synthase is especially active in the epidermis of the root tip and that the TR2′ gene is root specific in the intact plant and stimulated by wounding in leaf tissue, an especially desirable combination of characteristics for use with an insecticidal or larvicidal gene (see EMBO J. 8(2):343-350). The TR1′ gene, fused to nptII (neomycin phosphotransferase II) showed similar characteristics. Additional root-preferred promoters include the VfENOD-GRP3 gene promoter (Kuster et al. (1995) Plant Mol. Biol. 29(4):759-772); and rolB promoter (Capana et al. (1994) Plant Mol. Biol. 25(4):681-691. See also U.S. Pat. Nos. 5,837,876; 5,750,386; 5,633,363; 5,459,252; 5,401,836; 5,110,732; and 5,023,179.

[0116] Seed-preferred” promoters include both “seed-specific” promoters (those promoters active during seed development such as promoters of seed storage proteins) as well as “seed-germinating” promoters (those promoters active during seed germination). See Thompson et al. (1989) BioEssays 10:108. Such seed-preferred promoters include, but are not limited to, Cim1 (cytokinin-induced message); cZ19B1 (maize 19 kDa zein); and milps (myo-inositol-1-phosphate synthase) (see U.S. Pat. No. 6,225,529, herein incorporated by reference). Gamma-zein and Glob-1 are endosperm-specific promoters. For dicots, seed-specific promoters include, but are not limited to, bean □-phaseolin, napin, □-conglycinin, soybean lectin, cruciferin, and the like. For monocots, seed-specific promoters include, but are not limited to, maize 15 kDa zein, 22 kDa zein, 27 kDa zein, g-zein, waxy, shrunken 1, shrunken 2, globulin 1, etc. See also WO 00/12733, where seed-preferred promoters from end1 and end2 genes are disclosed. A promoter that has “preferred” expression in a particular tissue is expressed in that tissue to a greater degree than in at least one other plant tissue. Some tissue-preferred promoters show expression almost exclusively in the particular tissue.

[0117] In an embodiment, the plant-expressed promoter is a vascular-specific promoter such as a phloem-specific promoter. A “vascular-specific” promoter, as used herein, is a promoter which is at least expressed in vascular cells, or a promoter which is preferentially expressed in vascular cells. Expression of a vascular-specific promoter need not be exclusively in vascular cells, expression in other cell types or tissues is possible. A “phloem-specific promoter” as used herein, is a plant-expressible promoter which is at least expressed in phloem cells, or a promoter which is preferentially expressed in phloem cells.

[0118] Expression of a phloem-specific promoter need not be exclusively in phloem cells, expression in other cell types or tissues, e.g., xylem tissue, is possible. In one embodiment of this invention, a phloem-specific promoter is a plant-expressible promoter at least expressed in phloem cells, wherein the expression in non-phloem cells is more limited (or absent) compared to the expression in phloem cells. Examples of suitable vascular-specific or phloem-specific promoters in accordance with this invention include but are not limited to the promoters selected from the group consisting of: the SCSV3, SCSV4, SCSV5, and SCSV7 promoters (Schunmann et al. (2003) Plant Functional Biology 30:453-60; the rolC gene promoter of Agrobacterium rhizogenes(Kiyokawa et al. (1994) Plant Physiology 104:801-02; Pandolfini et al. (2003) Bio Med Central (BMC) Biotechnology 3:7, (www.biomedcentral.com/1472-6750/3/7); Graham et al. (1997) Plant Mol. Biol. 33:729-35; Guivarc'h et al. (1996); Almon et al. (1997) Plant Physiol. 115:1599-607; the rolA gene promoter of Agrobacterium rhizogenes (Dehio et al. (1993) Plant Mol. Biol. 23:1199-210); the promoter of the Agrobacterium tumefaciens T-DNA gene 5 (Korber et al. (1991) EMBO J. 10:3983-91); the rice sucrose synthase RSs1 gene promoter (Shi et al. (1994) J. Exp. Bot. 45:623-31); the CoYMV or Commelina yellow mottle badnavirus promoter (Medberry et al. (1992) Plant Cell 4:185-92; Zhou et al. (1998) Chin. J. Biotechnol. 14:9-16); the CFDV or coconut foliar decay virus promoter (Rohde et al. (1994) Plant Mol. Biol. 27:623-28; Hehn and Rhode (1998) J. Gen. Virol. 79:1495-99); the RTBV or rice tungro bacilliform virus promoter (Yin and Beachy (1995) Plant J. 7:969-80; Yin et al. (1997) Plant J. 12:1179-80); the pea glutamin synthase GS3A gene (Edwards et al. (1990) Proc. Natl. Acad. Sci. USA 87:3459-63; Brears et al. (1991) Plant J. 1:235-44); the inv CD111 and inv CD141 promoters of the potato invertase genes (Hedley et al. (2000) J. Exp. Botany 51:817-21); the promoter isolated from Arabidopsis shown to have phloem-specific expression in tobacco by Kertbundit et al. (1991) Proc. Natl. Acad. Sci. USA 88:5212-16); the VAHOX1 promoter region (Tornero et al. (1996) Plant J. 9:639-48); the pea cell wall invertase gene promoter (Zhang et al. (1996) Plant Physiol. 112:1111-17); the promoter of the endogenous cotton protein related to chitinase of US published patent application 20030106097, an acid invertase gene promoter from carrot (Ramloch-Lorenz et al. (1993) The Plant J. 4:545-54); the promoter of the sulfate transporter gene, Sultr1; 3 (Yoshimoto et al. (2003) Plant Physiol. 131:1511-17); a promoter of a sucrose synthase gene (Nolte and Koch (1993) Plant Physiol. 101:899-905); and the promoter of a tobacco sucrose transporter gene (Kuhn et al. (1997) Science 275-1298-1300).

[0119] Possible promoters also include the Black Cherry promoter for Prunasin Hydrolase (PH DL1.4 PRO) (U.S. Pat. No. 6,797,859), Thioredoxin H promoter from cucumber and rice (Fukuda A et al. (2005). Plant Cell Physiol. 46(11):1779-86), Rice (RSs1) (Shi, T. Wang et al. (1994). J. Exp. Bot. 45(274): 623-631) and maize sucrose synthase-1 promoters (Yang., N-S. et al. (1990) PNAS 87:4144-4148), PP2 promoter from pumpkin Guo, H. et al. (2004) Transgenic Research 13:559-566), At SUC2 promoter (Truernit, E. et al. (1995) Planta 196(3):564-70. At SAM-1 (S-adenosylmethionine synthetase) (Mijnsbrugge K V. et al. (1996) Plant Cell. Physiol. 37(8): 1108-1115), and the Rice tungro bacilliform virus (RTBV) promoter (Bhattacharyya-Pakrasi et al. (1993) Plant J. 4(1):71-79).

[0120] Where low level expression is desired, weak promoters will be used. Generally, the term “weak promoter” as used herein refers to a promoter that drives expression of a coding sequence at a low level. By low level expression at levels of about 1/1000 transcripts to about 1/100,000 transcripts to about 1/500,000 transcripts is intended. Alternatively, it is recognized that the term “weak promoters” also encompasses promoters that drive expression in only a few cells and not in others to give a total low level of expression. Where a promoter drives expression at unacceptably high levels, portions of the promoter sequence can be deleted or modified to decrease expression levels.

[0121] Such weak constitutive promoters include, for example the core promoter of the Rsyn7 promoter (WO 99/43838 and U.S. Pat. No. 6,072,050), the core 35S CaMV promoter, and the like. Other constitutive promoters include, for example, those disclosed in U.S. Pat. Nos. 5,608,149; 5,608,144; 5,604,121; 5,569,597; 5,466,785; 5,399,680; 5,268,463; 5,608,142; and 6,177,611.

[0122] The expression cassette can also comprise a selectable marker gene for the selection of transformed cells. Selectable marker genes are utilized for the selection of transformed cells or tissues. Marker genes include genes encoding antibiotic resistance, such as those encoding neomycin phosphotransferase II (NEO) and hygromycin phosphotransferase (HPT), as well as genes conferring resistance to herbicidal compounds, such as glufosinate ammonium, bromoxynil, imidazolinones, and 2,4-dichlorophenoxyacetate (2,4-D). Additional selectable markers include phenotypic markers such as β-galactosidase and fluorescent proteins such as green fluorescent protein (GFP) (Su et al. (2004) Biotechnol Bioeng 85:610-9 and Fetter et al. (2004) Plant Cell 16:215-28), cyan florescent protein (CYP) (Bolte et al. (2004) J. Cell Science 117:943-54 and Kato et al. (2002) Plant Physiol 129:913-42), and yellow florescent protein (PhiYFP™ from Evrogen, see, Bolte et al. (2004) J. Cell Science 117:943-54). For additional selectable markers, see generally, Yarranton (1992) Curr. Opin. Biotech. 3:506-511; Christopherson et al. (1992) Proc. Natl. Acad. Sci. USA 89:6314-6318; Yao et al. (1992) Cell 71:63-72; Reznikoff (1992) Mol. Microbiol. 6:2419-2422; Barkley et al. (1980) in The Operon, pp. 177-220; Hu et al. (1987) Cell 48:555-566; Brown et al. (1987) Cell 49:603-612; Figge et al. (1988) Cell 52:713-722; Deuschle et al. (1989) Proc. Natl. Acad. Sci. USA 86:5400-5404; Fuerst et al. (1989) Proc. Natl. Acad. Sci. USA 86:2549-2553; Deuschle et al. (1990) Science 248:480-483; Gossen (1993) Ph.D. Thesis, University of Heidelberg; Reines et al. (1993) Proc. Natl. Acad. Sci. USA 90:1917-1921; Labow et al. (1990) Mol. Cell. Biol. 10:3343-3356; Zambretti et al. (1992) Proc. Natl. Acad. Sci. USA 89:3952-3956; Baim et al. (1991) Proc. Natl. Acad. Sci. USA 88:5072-5076; Wyborski et al. (1991) Nucleic Acids Res. 19:4647-4653; Hillenand-Wissman (1989) Topics Mol. Struc. Biol. 10:143-162; Degenkolb et al. (1991) Antimicrob. Agents Chemother. 35:1591-1595; Kleinschnidt et al. (1988) Biochemistry 27:1094-1104; Bonin (1993) Ph.D. Thesis, University of Heidelberg; Gossen et al. (1992) Proc. Natl. Acad. Sci. USA 89:5547-5551; Oliva et al. (1992) Antimicrob. Agents Chemother. 36:913-919; Hlavka et al. (1985) Handbook of Experimental Pharmacology, Vol. 78 (Springer-Verlag, Berlin); Gill et al. (1988) Nature 334:721-724. The above list of selectable marker genes is not meant to be limiting. Any selectable marker gene can be used with the compositions and methods described herein.

### VI. Compositions Comprising Silencing Elements

[0123] One or more of the polynucleotides comprising the silencing element may be provided as an external composition such as a spray or powder to the plant, plant part, seed, a plant insect pest, or an area of cultivation. In another example, a plant is transformed with a DNA construct or expression cassette for expression of at least one silencing element. In either composition, the silencing element, when ingested by an insect, can reduce the level of a target pest sequence and thereby control the pest (i.e., a Coleopteran plant pest including a Diabrotica plant pest, such as, D. virgifera virgifera, D. barberi, D. virgifera zeae, D. speciosa, or D. undecimpunctata howardi). It is recognized that the composition may comprise a cell (such as plant cell or a bacterial cell), in which one or more polynucleotides encoding the silencing elements are stably incorporated into the genome and operably linked to promoters active in the cell. Compositions comprising a mixture of cells, some cells expressing at least one silencing element are also encompassed. In other embodiments, compositions comprising the silencing elements are not contained in a cell. In such embodiments, the composition can be applied to an area inhabited by a plant insect pest. In one embodiment, the composition is applied externally to a plant (i.e., by spraying a field or area of cultivation) to protect the plant from the pest. Methods of applying nucleotides in such a manner are known to those of skill in the art.

[0124] A composition disclosed herein may further be formulated as bait. In this embodiment, the compositions comprise a food substance or an attractant which enhances the attractiveness of the composition to the pest.

[0125] A composition comprising the silencing elements may be formulated in an agriculturally suitable and/or environmentally acceptable carrier. Such carriers may be any material that the animal, plant or environment to be treated can tolerate. Furthermore, the carrier must be such that the composition remains effective at controlling a plant insect pest. Examples of such carriers include water, saline, Ringer's solution, dextrose or other sugar solutions, Hank's solution, and other aqueous physiologically balanced salt solutions, phosphate buffer, bicarbonate buffer and Tris buffer. In addition, the composition may include compounds that increase the half-life of a composition. Various insecticidal formulations can also be found in, for example, US Publications 2008/0275115, 2008/0242174, 2008/0027143, 2005/0042245, and 2004/0127520.

[0126] It is recognized that the polynucleotides comprising sequences encoding the silencing elements may be used to transform organisms to provide for host organism production of these components, and subsequent application of the host organism to the environment of the target pest(s). Such host organisms include baculoviruses, bacteria, and the like. In this manner, the combination of polynucleotides encoding the silencing elements may be introduced via a suitable vector into a microbial host, and said host applied to the environment, or to plants or animals.

[0127] The term “introduced” in the context of inserting a nucleic acid into a cell, means “transfection” or “transformation” or “transduction” and includes reference to the incorporation of a nucleic acid into a eukaryotic or prokaryotic cell where the nucleic acid may be stably incorporated into the genome of the cell (e.g., chromosome, plasmid, plastid, or mitochondrial DNA), converted into an autonomous replicon, or transiently expressed (e.g., transfected mRNA).

[0128] Microbial hosts that are known to occupy the “phytosphere” (phylloplane, phyllosphere, rhizosphere, and/or rhizoplana) of one or more crops of interest may be selected. These microorganisms are selected so as to be capable of successfully competing in the particular environment with the wild-type microorganisms, provide for stable maintenance and expression of the sequences encoding the silencing element, and desirably, provide for improved protection of the components from environmental degradation and inactivation.

[0129] Such microorganisms include bacteria, algae, and fungi. Of particular interest are microorganisms such as bacteria, e.g., Pseudomonas, Erwinia, Serratia, Klebsiella, Xanthomonas, Streptomyces, Rhizobium, Rhodopseudomonas, Methylius, Agrobacterium, Acetobacter, Lactobacillus, Arthrobacter, Azotobacter, Leuconostoc, and Alcaligenes, fungi, particularly yeast, e.g., Saccharomyces, Cryptococcus, Kluyveromyces, Sporobolomyces, Rhodotorula, and Aureobasidium. Of particular interest are such phytosphere bacterial species as Pseudomonas syringae, Pseudomonas fluorescens, Serratia marcescens, Acetobacter xylinum, Agro bacteria, Rhodopseudomonas spheroides, Xanthomonas campestris, Rhizobium melioti, Alcaligenes entrophus, Clavibacter xyli and Azotobacter vinlandir, and phytosphere yeast species such as Rhodotorula rubra, R. glutinis, R. marina, R. aurantiaca, Cryptococcus albidus, C. diffluens, C. laurentii, Saccharomyces rosei, S. pretoriensis, S. cerevisiae, Sporobolomyces rosues, S. odorus, Kluyveromyces veronae, and Aureobasidium pollulans. Of particular interest are the pigmented microorganisms.

[0130] A number of ways are available for introducing the polynucleotides comprising the silencing elements into the microbial host under conditions that allow for stable maintenance and expression of such nucleotide encoding sequences. For example, expression cassettes can be constructed which include the nucleotide constructs of interest operably linked with the transcriptional and translational regulatory signals for expression of the nucleotide constructs, and a nucleotide sequence homologous with a sequence in the host organism, whereby integration will occur, and/or a replication system that is functional in the host, whereby integration or stable maintenance will occur.

[0131] Transcriptional and translational regulatory signals include, but are not limited to, promoters, transcriptional initiation start sites, operators, activators, enhancers, other regulatory elements, ribosomal binding sites, an initiation codon, termination signals, and the like. See, for example, U.S. Pat. Nos. 5,039,523 and 4,853,331; EP 0480762A2; Sambrook et al. (2000); Molecular Cloning: A Laboratory Manual (3^{rd} edition; Cold Spring Harbor Laboratory Press, Plainview, N.Y.); Davis et al. (1980) Advanced Bacterial Genetics (Cold Spring Harbor Laboratory, Cold Spring Harbor, N.Y.); and the references cited therein.

[0132] Suitable host cells include the prokaryotes and the lower eukaryotes, such as fungi. Illustrative prokaryotes, both Gram-negative and Gram-positive, include Enterobacteriaceae, such as Escherichia, Erwinia, Shigella, Salmonella, and Proteus; Bacillaceae; Rhizobiceae, such as Rhizobium; Spirillaceae, such as photobacterium, Zymomonas, Serratia, Aeromonas, Vibrio, Desulfovibrio, Spirillum; Lactobacillaceae; Pseudomonadaceae, such as Pseudomonas and Acetobacter; Azotobacteraceae and Nitrobacteraceae. Among eukaryotes are fungi, such as Phycomycetes and Ascomycetes, which includes yeast, such as Saccharomyces and Schizosaccharomyces; and Basidiomycetes yeast, such as Rhodotorula, Aureobasidium, Sporobolomyces, and the like.

[0133] Characteristics of particular interest in selecting a host cell may include ease of introducing the coding sequence into the host, availability of expression systems, efficiency of expression, stability in the host, and the presence of auxiliary genetic capabilities. Characteristics of interest for use as a pesticide microcapsule include protective qualities, such as thick cell walls, pigmentation, and intracellular packaging or formation of inclusion bodies; leaf affinity; lack of mammalian toxicity; attractiveness to pests for ingestion; and the like. Other considerations include ease of formulation and handling, economics, storage stability, and the like.

[0134] Host organisms of particular interest include yeast, such as Rhodotorula spp., Aureobasidium spp., Saccharomyces spp., and Sporobolomyces spp., phylloplane organisms such as Pseudomonas spp., Erwinia spp., and Flavobacterium spp., and other such organisms, including Pseudomonas aeruginosa, Pseudomonas fluorescens, Saccharomyces cerevisiae, Bacillus thuringiensis, Escherichia coli, Bacillus subtilis, and the like.

[0135] The sequences encoding the silencing elements encompassed by the invention may be introduced into microorganisms that multiply on plants (epiphytes) to deliver these components to potential target pests. Epiphytes, for example, can be gram-positive or gram-negative bacteria.

[0136] A silencing element may be fermented in a bacterial host and the resulting bacteria processed and used as a microbial spray in the same manner that Bacillus thuringiensis strains have been used as insecticidal sprays. Any suitable microorganism can be used for this purpose. By way of example, Pseudomonas has been used to express Bacillus thuringiensis endotoxins as encapsulated proteins and the resulting cells processed and sprayed as an insecticide Gaertner et al. (1993), in Advanced Engineered Pesticides, ed. L. Kim (Marcel Decker, Inc.).

[0137] Alternatively, the components of the invention are produced by introducing heterologous genes into a cellular host. Expression of the heterologous sequences results, directly or indirectly, in the intracellular production of a silencing element. These compositions may then be formulated in accordance with conventional techniques for application to the environment hosting a target pest, e.g., soil, water, and foliage of plants. See, for example, EPA 0192319, and the references cited therein.

[0138] A transformed microorganism can be formulated with an acceptable carrier into separate or combined compositions that are, for example, a suspension, a solution, an emulsion, a dusting powder, a dispersible granule, a wettable powder, and an emulsifiable concentrate, an aerosol, an impregnated granule, an adjuvant, a coatable paste, and also encapsulations in, for example, polymer substances.

[0139] Such compositions disclosed above may be obtained by the addition of a surface-active agent, an inert carrier, a preservative, a humectant, a feeding stimulant, an attractant, an encapsulating agent, a binder, an emulsifier, a dye, a UV protectant, a buffer, a flow agent or fertilizers, micronutrient donors, or other preparations that influence plant growth. One or more agrochemicals including, but not limited to, herbicides, insecticides, fungicides, bactericides, nematicides, molluscicides, acaracides, plant growth regulators, harvest aids, and fertilizers, can be combined with carriers, surfactants or adjuvants customarily employed in the art of formulation or other components to facilitate product handling and application for particular target pests. Suitable carriers and adjuvants can be solid or liquid and correspond to the substances ordinarily employed in formulation technology, e.g., natural or regenerated mineral substances, solvents, dispersants, wetting agents, tackifiers, binders, or fertilizers. The active ingredients (i.e., at least one silencing element) are normally applied in the form of compositions and can be applied to the crop area, plant, or seed to be treated. For example, the compositions may be applied to grain in preparation for or during storage in a grain bin or silo, etc. The compositions may be applied simultaneously or in succession with other compounds. Methods of applying an active ingredient or a composition that contains at least one silencing element include, but are not limited to, foliar application, seed coating, and soil application. The number of applications and the rate of application depend on the intensity of infestation by the corresponding pest.

[0140] Suitable surface-active agents include, but are not limited to, anionic compounds such as a carboxylate of, for example, a metal; carboxylate of a long chain fatty acid; an N-acylsarcosinate; mono- or di-esters of phosphoric acid with fatty alcohol ethoxylates or salts of such esters; fatty alcohol sulfates such as sodium dodecyl sulfate, sodium octadecyl sulfate, or sodium cetyl sulfate; ethoxylated fatty alcohol sulfates; ethoxylated alkylphenol sulfates; lignin sulfonates; petroleum sulfonates; alkyl aryl sulfonates such as alkyl-benzene sulfonates or lower alkylnaphtalene sulfonates, e.g., butyl-naphthalene sulfonate; salts of sulfonated naphthalene-formaldehyde condensates; salts of sulfonated phenol-formaldehyde condensates; more complex sulfonates such as the amide sulfonates, e.g., the sulfonated condensation product of oleic acid and N-methyl taurine; or the dialkyl sulfosuccinates, e.g., the sodium sulfonate or dioctyl succinate. Non-ionic agents include condensation products of fatty acid esters, fatty alcohols, fatty acid amides or fatty-alkyl- or alkenyl-substituted phenols with ethylene oxide, fatty esters of polyhydric alcohol ethers, e.g., sorbitan fatty acid esters, condensation products of such esters with ethylene oxide, e.g., polyoxyethylene sorbitan fatty acid esters, block copolymers of ethylene oxide and propylene oxide, acetylenic glycols such as 2,4,7,9-tetraethyl-5-decyn-4,7-diol, or ethoxylated acetylenic glycols. Examples of a cationic surface-active agent include, for instance, an aliphatic mono-, di-, or polyamine such as an acetate, naphthenate or oleate; or oxygen-containing amine such as an amine oxide of polyoxyethylene alkylamine; an amide-linked amine prepared by the condensation of a carboxylic acid with a di- or polyamine; or a quaternary ammonium salt.

[0141] Examples of inert materials include, but are not limited to, inorganic minerals such as kaolin, phyllosilicates, carbonates, sulfates, phosphates, or botanical materials such as cork, powdered corncobs, peanut hulls, rice hulls, and walnut shells.

[0142] The compositions comprising silencing elements may be in a suitable form for direct application or as a concentrate of primary composition that requires dilution with a suitable quantity of water or other dilutant before application.

[0143] The compositions (including the transformed microorganisms) may be applied to the environment of an insect pest (such as a Coleoptera plant pest or a Diabrotica plant pest) by, for example, spraying, atomizing, dusting, scattering, coating or pouring, introducing into or on the soil, introducing into irrigation water, by seed treatment or general application or dusting at the time when the pest has begun to appear or before the appearance of pests as a protective measure. For example, the composition(s) and/or transformed microorganism(s) may be mixed with grain to protect the grain during storage. It is generally important to obtain good control of pests in the early stages of plant growth, as this is the time when the plant can be most severely damaged. The compositions can conveniently contain another insecticide if this is thought necessary. In an embodiment of the invention, the composition(s) is applied directly to the soil, at a time of planting, in granular form of a composition of a carrier and dead cells of a Bacillus strain or transformed microorganism of the invention. Another embodiment is a granular form of a composition comprising an agrochemical such as, for example, an herbicide, an insecticide, a fertilizer, in an inert carrier, and dead cells of a Bacillus strain or transformed microorganism of the invention.

VII. Plants, Plant Parts, and Methods of Introducing Sequences into Plants

[0144] In one embodiment, the methods of the invention involve introducing one or more polynucleotides into a plant. “Introducing” is intended to mean presenting to the plant the polynucleotide in such a manner that the sequence gains access to the interior of a cell of the plant. The methods of the invention do not depend on a particular method for introducing a sequence into a plant, only that the polynucleotide or polypeptides gains access to the interior of at least one cell of the plant. Methods for introducing polynucleotides into plants are known in the art including, but not limited to, stable transformation methods, transient transformation methods, and virus-mediated methods.

[0145] “Stable transformation” is intended to mean that the nucleotide construct introduced into a plant integrates into the genome of the plant and is capable of being inherited by the progeny thereof. “Transient transformation” is intended to mean that a polynucleotide is introduced into the plant and does not integrate into the genome of the plant or a polypeptide is introduced into a plant.

[0146] Transformation protocols as well as protocols for introducing polypeptides or polynucleotide sequences into plants may vary depending on the type of plant or plant cell, i.e., monocot or dicot, targeted for transformation. Suitable methods of introducing polypeptides and polynucleotides into plant cells include microinjection (Crossway et al. (1986) Biotechniques 4:320-334), electroporation (Riggs et al. (1986) Proc. Natl. Acad. Sci. USA 83:5602-5606, Agrobacterium-mediated transformation (U.S. Pat. Nos. 5,563,055 and 5,981,840), direct gene transfer (Paszkowski et al. (1984) EMBO J. 3:2717-2722), and ballistic particle acceleration (see, for example, U.S. Pat. Nos. 4,945,050; 5,879,918; 5,886,244; and, 5,932,782; Tomes et al. (1995) in Plant Cell, Tissue, and Organ Culture: Fundamental Methods, ed. Gamborg and Phillips (Springer-Verlag, Berlin); McCabe et al. (1988) Biotechnology 6:923-926); and Lec1 transformation (WO 00/28058). Also see Weissinger et al. (1988) Ann. Rev. Genet. 22:421-477; Sanford et al. (1987) Particulate Science and Technology 5:27-37 (onion); Christou et al. (1988) Plant Physiol. 87:671-674 (soybean); McCabe et al. (1988) Bio/Technology 6:923-926 (soybean); Finer and McMullen (1991) In Vitro Cell Dev. Biol. 27P:175-182 (soybean); Singh et al. (1998) Theor. Appl. Genet. 96:319-324 (soybean); Datta et al. (1990) Biotechnology 8:736-740 (rice); Klein et al. (1988) Proc. Natl. Acad. Sci. USA 85:4305-4309 (maize); Klein et al. (1988) Biotechnology 6:559-563 (maize); U.S. Pat. Nos. 5,240,855; 5,322,783; and, 5,324,646; Klein et al. (1988) Plant Physiol. 91:440-444 (maize); Fromm et al. (1990) Biotechnology 8:833-839 (maize); Hooykaas-Van Slogteren et al. (1984) Nature (London) 311:763-764; U.S. Pat. No. 5,736,369 (cereals); Bytebier et al. (1987) Proc. Natl. Acad. Sci. USA 84:5345-5349 (Liliaceae); De Wet et al. (1985) in The Experimental Manipulation of Ovule Tissues, ed. Chapman et al. (Longman, New York), pp. 197-209 (pollen); Kaeppler et al. (1990) Plant Cell Reports 9:415-418 and Kaeppler et al. (1992) Theor. Appl. Genet. 84:560-566 (whisker-mediated transformation); D'Halluin et al. (1992) Plant Cell 4:1495-1505 (electroporation); Li et al. (1993) Plant Cell Reports 12:250-255 and Christou and Ford (1995) Annals of Botany 75:407-413 (rice); Osjoda et al. (1996) Nature Biotechnology 14:745-750 (maize via Agrobacterium tumefaciens).

[0147] In certain embodiments, one or more silencing elements disclosed herein may be provided to a plant using a variety of transient transformation methods. Such transient transformation methods include, but are not limited to, the introduction of the protein or variants or fragments thereof directly into the plant or the introduction of the transcript into the plant. Such methods include, for example, microinjection or particle bombardment. See, for example, Crossway et al. (1986) Mol Gen. Genet. 202:179-185; Nomura et al. (1986) Plant Sci. 44:53-58; Hepler et al. (1994) Proc. Natl. Acad. Sci. 91: 2176-2180 and Hush et al. (1994) The Journal of Cell Science 107:775-784, all of which are herein incorporated by reference. Alternatively, polynucleotides can be transiently transformed into the plant using techniques known in the art. Such techniques include viral vector systems and the precipitation of the polynucleotide in a manner that precludes subsequent release of the DNA. Such methods include the use of particles coated with polyethylimine (PEI; Sigma #P3143).

[0148] In other embodiments, the polynucleotides disclosed herein may be introduced into plants by contacting plants with a virus or viral nucleic acids. Generally, such methods involve incorporating one or more nucleotide constructs of the invention within a viral DNA or RNA molecule. Further, it is recognized that promoters may also encompass promoters utilized for transcription by viral RNA polymerases. Methods for introducing polynucleotides into plants and expressing a protein encoded therein, involving viral DNA or RNA molecules, are known in the art. See, for example, U.S. Pat. Nos. 5,889,191, 5,889,190, 5,866,785, 5,589,367, 5,316,931, and Porta et al. (1996) Molecular Biotechnology 5:209-221.

[0149] Methods are known in the art for the targeted insertion of one or more polynucleotides at a specific locations in the plant genome. In one embodiment, the insertion of the polynucleotide at a desired genomic location is achieved using a site-specific recombination system. See, for example, WO99/25821, WO99/25854, WO99/25840, WO99/25855, and WO99/25853. Briefly, one or more of the polynucleotides disclosed herein may be contained in transfer cassette flanked by two non-recombinogenic recombination sites. The transfer cassette is introduced into a plant having stably incorporated into its genome a target site which is flanked by two non-recombinogenic recombination sites that correspond to the sites of the transfer cassette. An appropriate recombinase is provided and the transfer cassette is integrated at the target site. The one or more polynucleotides of interest are thereby integrated at a specific chromosomal position in the plant genome.

[0150] The cells that have been transformed may be grown into plants in accordance with conventional ways. See, for example, McCormick et al. (1986) Plant Cell Reports 5:81-84. These plants may then be grown, and either pollinated with the same transformed strain or different strains, and the resulting progeny having constitutive expression of the desired phenotypic characteristic identified. Two or more generations may be grown to ensure that expression of the desired phenotypic characteristic is stably maintained and inherited and then seeds harvested to ensure expression of the desired phenotypic characteristic has been achieved. In this manner, the compositions and methods described herein provide transformed seeds (also referred to as “transgenic seed”) having a polynucleotide disclosed herein, for example, an expression cassette, stably incorporated into their genome.

[0151] As used herein, the term plant includes plant cells, plant protoplasts, plant cell tissue cultures from which plants can be regenerated, plant calli, plant clumps, and plant cells that are intact in plants or parts of plants such as embryos, pollen, ovules, seeds, leaves, flowers, branches, fruit, kernels, ears, cobs, husks, stalks, roots, root tips, anthers, and the like. Grain is intended to mean the mature seed produced by commercial growers for purposes other than growing or reproducing the species. Progeny, variants, and mutants of the regenerated plants are also included within the scope of the invention, provided that these parts comprise the introduced polynucleotides.

[0152] The compositions and methods described herein may be used for transformation of any plant species, including, but not limited to, monocots and dicots. Examples of plant species of interest include, but are not limited to, corn (Zea mays), Brassica sp. (e.g., B. napus, B. rapa, B. juncea), particularly those Brassica species useful as sources of seed oil, alfalfa (Medicago sativa), rice (Oryza sativa), rye (Secale cereale), sorghum (Sorghum bicolor, Sorghum vulgare), millet (e.g., pearl millet (Pennisetum glaucum), proso millet (Panicum miliaceum), foxtail millet (Setaria italica), finger millet (Eleusine coracana)), sunflower (Helianthus annuus), safflower (Carthamus tinctorius), wheat (Triticum aestivum), soybean (Glycine max), tobacco (Nicotiana tabacum), potato (Solanum tuberosum), peanuts (Arachis hypogaea), cotton (Gossypium barbadense, Gossypium hirsutum), sweet potato (Ipomoea batatus), cassava (Manihot esculenta), coffee (Coffea spp.), coconut (Cocos nucifera), pineapple (Ananas comosus), citrus trees (Citrus spp.), cocoa (Theobroma cacao), tea (Camellia sinensis), banana (Musa spp.), avocado (Persea americana), fig (Ficus casica), guava (Psidium guajava), mango (Mangifera indica), olive (Olea europaea), papaya (Carica papaya), cashew (Anacardium occidentale), macadamia (Macadamia integrifolia), almond (Prunus amygdalus), sugar beets (Beta vulgaris), sugarcane (Saccharum spp.), oats, barley, vegetables, ornamentals, and conifers.

[0153] Vegetables include tomatoes (Lycopersicon esculentum), lettuce (e.g., Lactuca sativa), green beans (Phaseolus vulgaris), lima beans (Phaseolus limensis), peas (Lathyrus spp.), and members of the genus Cucumis such as cucumber (C. sativus), cantaloupe (C. cantalupensis), and musk melon (C. melo). Ornamentals include azalea (Rhododendron spp.), hydrangea (Macrophylla hydrangea), hibiscus (Hibiscus rosasanensis), roses (Rosa spp.), tulips (Tulipa spp.), daffodils (Narcissus spp.), petunias (Petunia hybrida), carnation (Dianthus caryophyllus), poinsettia (Euphorbia pulcherrima), and chrysanthemum.

[0154] Conifers that may be employed in practicing the compositions and methods described herein include, for example, pines such as loblolly pine (Pinus taeda), slash pine (Pinus elliotii), ponderosa pine (Pinus ponderosa), lodgepole pine (Pinus contorta), and Monterey pine (Pinus radiata); Douglas-fir (Pseudotsuga menziesii); Western hemlock (Tsuga canadensis); Sitka spruce (Picea glauca); redwood (Sequoia sempervirens); true firs such as silver fir (Abies amabilis) and balsam fir (Abies balsamea); and cedars such as Western red cedar (Thuja plicata) and Alaska yellow-cedar (Chamaecyparis nootkatensis). In certain embodiments, the compositions and methods described herein can be used with plants such as crop plants (for example, corn, alfalfa, sunflower, Brassica, soybean, cotton, safflower, peanut, sorghum, wheat, millet, tobacco, etc.). In other embodiments, corn and soybean plants and sugarcane plants are optimal, and in yet other embodiments corn plants are optimal.

[0155] Other plants of interest include grain plants that provide seeds of interest, oil-seed plants, and leguminous plants. Seeds of interest include grain seeds, such as corn, wheat, barley, rice, sorghum, rye, etc. Oil-seed plants include cotton, soybean, safflower, sunflower, Brassica, maize, alfalfa, palm, coconut, etc. Leguminous plants include beans and peas. Beans include guar, locust bean, fenugreek, soybean, garden beans, cowpea, mungbean, lima bean, fava bean, lentils, chickpea, etc.

### VIII. Stacking of Traits in Transgenic Plant

[0156] Transgenic plants may comprise a stack of one or more target polynucleotides as set forth in SEQ ID NOS.: 1-53 or 107-407, or variants or fragments thereof, or complements thereof, as disclosed herein with one or more additional polynucleotides resulting in the production or suppression of multiple polypeptide sequences. Transgenic plants comprising stacks of polynucleotide sequences can be obtained by either or both of traditional breeding methods or through genetic engineering methods. These methods include, but are not limited to, breeding individual lines each comprising a polynucleotide of interest, transforming a transgenic plant comprising an expression construct comprising various target polynucleotides as set forth in SEQ ID NOS.: 1-53 or 107-407, or encoding silencing elements directed to such target sequence variants or fragments thereof, or complements thereof, as disclosed herein with a subsequent gene and co-transformation of genes into a single plant cell. As used herein, the term “stacked” includes having the multiple traits present in the same plant (i.e., both traits are incorporated into the nuclear genome, one trait is incorporated into the nuclear genome and one trait is incorporated into the genome of a plastid or both traits are incorporated into the genome of a plastid). In one non-limiting example, “stacked traits” comprise a molecular stack where the sequences are physically adjacent to each other. A trait, as used herein, refers to the phenotype derived from a particular sequence or groups of sequences. Co-transformation of polynucleotides can be carried out using single transformation vectors comprising multiple polynucleotides or polynucleotides carried separately on multiple vectors. If the sequences are stacked by genetically transforming the plants, the polynucleotide sequences of interest can be combined at any time and in any order. The traits can be introduced simultaneously in a co-transformation protocol with the polynucleotides of interest provided by any combination of transformation cassettes. For example, if two sequences will be introduced, the two sequences can be contained in separate transformation cassettes (trans) or contained on the same transformation cassette (cis). Expression of the sequences can be driven by the same promoter or by different promoters. It is further recognized that polynucleotide sequences can be stacked at a desired genomic location using a site-specific recombination system. See, for example, WO 1999/25821, WO 1999/25854, WO 1999/25840, WO 1999/25855 and WO 1999/25853.

[0157] In some embodiments the various target polynucleotides as set forth in SEQ ID NOS.: 1-53 or 107-407, silencing elements directed to such target sequences, and variants or fragments thereof, or complements thereof, as disclosed herein, alone or stacked with one or more additional insect resistance traits can be stacked with one or more additional input traits (e.g., herbicide resistance, fungal resistance, virus resistance, stress tolerance, disease resistance, male sterility, stalk strength, and the like) or output traits (e.g., increased yield, modified starches, improved oil profile, balanced amino acids, high lysine or methionine, increased digestibility, improved fiber quality, drought resistance, and the like). Thus, the polynucleotide embodiments can be used to provide a complete agronomic package of improved crop quality with the ability to flexibly and cost effectively control any number of agronomic pests.

[0158] Transgenes useful for stacking include, but are not limited to, to those as described herein below.

[0159] i. Transgenes that Confer Resistance to Insects or Disease

[0160] (A) Plant disease resistance genes. Plant defenses are often activated by specific interaction between the product of a disease resistance gene (R) in the plant and the product of a corresponding avirulence (Avr) gene in the pathogen. A plant variety can be transformed with cloned resistance gene to engineer plants that are resistant to specific pathogen strains. See, for example, Jones, et al., (1994) Science 266:789 (cloning of the tomato Cf-9 gene for resistance to Cladosporium fulvum); Martin, et al., (1993) Science 262:1432 (tomato Pto gene for resistance to Pseudomonas syringae pv. tomato encodes a protein kinase); Mindrinos, et al., (1994) Cell 78:1089 (Arabidopsis RSP2 gene for resistance to Pseudomonas syringae), McDowell and Woffenden, (2003) Trends Biotechnol. 21(4):178-83 and Toyoda, et al., (2002) Transgenic Res. 11(6):567-82. A plant resistant to a disease is one that is more resistant to a pathogen as compared to the wild type plant.

[0161] (B) Genes encoding a Bacillus thuringiensis protein, a derivative thereof or a synthetic polypeptide modeled thereon. See, for example, Geiser, et al., (1986) Gene 48:109, who disclose the cloning and nucleotide sequence of a Bt delta-endotoxin gene. Moreover, DNA molecules encoding delta-endotoxin genes can be purchased from American Type Culture Collection (Rockville, Md.), for example, under ATCC® Accession Numbers 40098, 67136, 31995 and 31998. Other non-limiting examples of Bacillus thuringiensis transgenes being genetically engineered are given in the following patents and patent applications and hereby are incorporated by reference for this purpose: U.S. Pat. Nos. 5,188,960; 5,689,052; 5,880,275; 5,986,177; 6,023,013, 6,060,594, 6,063,597, 6,077,824, 6,620,988, 6,642,030, 6,713,259, 6,893,826, 7,105,332; 7,179,965, 7,208,474; 7,227,056, 7,288,643, 7,323,556, 7,329,736, 7,449,552, 7,468,278, 7,510,878, 7,521,235, 7,544,862, 7,605,304, 7,696,412, 7,629,504, 7,705,216, 7,772,465, 7,790,846, 7,858,849 and WO 1991/14778; WO 1999/31248; WO 2001/12731; WO 1999/24581 and WO 1997/40162.

[0162] Genes encoding pesticidal proteins may also be stacked including but are not limited to: insecticidal proteins from Pseudomonas sp. such as PSEEN3174 (Monalysin, (2011) PLoS Pathogens, 7:1-13), from Pseudomonas protegens strain CHA0 and Pf-5 (previously fluorescens) (Pechy-Tarr, (2008) Environmental Microbiology 10:2368-2386: GenBank Accession No. EU400157); from Pseudomonas Taiwanensis (Liu, et al., (2010) J. Agric. Food Chem. 58:12343-12349) and from Pseudomonas pseudoalcligenes (Zhang, et al., (2009) Annals of Microbiology 59:45-50 and Li, et al., (2007) Plant Cell Tiss. Organ Cult. 89:159-168); insecticidal proteins from Photorhabdus sp. and Xenorhabdus sp. (Hinchliffe, et al., (2010) The Open Toxinology Journal 3:101-118 and Morgan, et al., (2001) Applied and Envir. Micro. 67:2062-2069), U.S. Pat. Nos. 6,048,838, and 6,379,946; a PIP-1 polypeptide of US Patent Publication US20140007292; an AfIP-1A and/or AfIP-1B polypeptide of US Patent Publication US20140033361; a PHI-4 polypeptide of US Patent Publication US20140274885 and US20160040184; a PIP-47 polypeptide of PCT Publication Number WO2015/023846, a PIP-72 polypeptide of PCT Publication Number WO2015/038734; a PtIP-50 polypeptide and a PtIP-65 polypeptide of PCT Publication Number WO2015/120270; a PtIP-83 polypeptide of PCT Publication Number WO2015/120276; a PtIP-96 polypeptide of PCT Serial Number PCT/US15/55502; and δ-endotoxins including, but not limited to, the Cry1, Cry2, Cry3, Cry4, Cry5, Cry6, Cry7, Cry8, Cry9, Cry10, Cry11, Cry12, Cry13, Cry14, Cry15, Cry16, Cry17, Cry18, Cry19, Cry20, Cry21, Cry22, Cry23, Cry24, Cry25, Cry26, Cry27, Cry 28, Cry 29, Cry 30, Cry31, Cry32, Cry33, Cry34, Cry35,Cry36, Cry37, Cry38, Cry39, Cry40, Cry41, Cry42, Cry43, Cry44, Cry45, Cry 46, Cry47, Cry49, Cry 51 and Cry55 classes of δ-endotoxin genes and the B. thuringiensis cytolytic Cyt1 and Cyt2 genes. Members of these classes of B. thuringiensis insecticidal proteins include, but are not limited to Cry1Aa1 (Accession # AAA22353); Cry1Aa2 (Accession # Accession # AAA22552); Cry1Aa3 (Accession # BAA00257); Cry1Aa4 (Accession # CAA31886); Cry1Aa5 (Accession # BAA04468); Cry1Aa6 (Accession # AAA86265); Cry1Aa7 (Accession # AAD46139); Cry1Aa8 (Accession #126149); Cry1Aa9 (Accession # BAA77213); Cry1Aa10 (Accession # AAD55382); Cry1Aa11 (Accession # CAA70856); Cry1Aa12 (Accession # AAP80146); Cry1Aa13 (Accession # AAM44305); Cry1Aa14 (Accession # AAP40639); Cry1Aa15 (Accession # AAY66993); Cry1Aa16 (Accession # HQ439776); Cry1Aa17 (Accession # HQ439788); Cry1Aa18 (Accession # HQ439790); Cry1Aa19 (Accession # HQ685121); Cry1Aa20 (Accession # JF340156); Cry1Aa21 (Accession # JN651496); Cry1Aa22 (Accession # KC158223); Cry1Ab1 (Accession # AAA22330); Cry1Ab2 (Accession # AAA22613); Cry1Ab3 (Accession # AAA22561); Cry1Ab4 (Accession # BAA00071); Cry1Ab5 (Accession # CAA28405); Cry1Ab6 (Accession # AAA22420); Cry1Ab7 (Accession # CAA31620); Cry1Ab8 (Accession # AAA22551); Cry1Ab9 (Accession # CAA38701); Cry1Ab10 (Accession # A29125); Cry1Ab11 (Accession #112419); Cry1Ab12 (Accession # AAC64003); Cry1Ab13 (Accession # AAN76494); Cry1Ab14 (Accession # AAG16877); Cry1Ab15 (Accession # AAO13302); Cry1Ab16 (Accession # AAK55546); Cry1Ab17 (Accession # AAT46415); Cry1Ab18 (Accession # AAQ88259); Cry1Ab19 (Accession # AAW31761); Cry1Ab20 (Accession # ABB72460); Cry1Ab21 (Accession # ABS18384); Cry1Ab22 (Accession # ABW87320); Cry1Ab23 (Accession # HQ439777); Cry1Ab24 (Accession # HQ439778); Cry1Ab25 (Accession # HQ685122); Cry1Ab26 (Accession # HQ847729); Cry1Ab27 (Accession # JN135249); Cry1Ab28 (Accession # JN135250); Cry1Ab29 (Accession # JN135251); Cry1Ab30 (Accession # JN135252); Cry1Ab31 (Accession # JN135253); Cry1Ab32 (Accession # JN135254); Cry1Ab33 (Accession # AAS93798); Cry1Ab34 (Accession # KC156668); Cry1Ab-like (Accession # AAK14336); Cry1Ab-like (Accession # AAK14337); Cry1Ab-like (Accession # AAK14338); Cry1Ab-like (Accession # ABG88858); Cry1Ac1 (Accession # AAA22331); Cry1Ac2 (Accession # AAA22338); Cry1Ac3 (Accession # CAA38098); Cry1Ac4 (Accession # AAA73077); Cry1Ac5 (Accession # AAA22339); Cry1Ac6 (Accession # AAA86266); Cry1Ac7 (Accession # AAB46989); Cry1Ac8 (Accession # AAC44841); Cry1Ac9 (Accession # AAB49768); Cry1Ac10 (Accession # CAA05505); Cry1Ac11 (Accession # CAA10270); Cry1Ac12 (Accession #112418); Cry1Ac13 (Accession # AAD38701); Cry1Ac14 (Accession # AAQ06607); Cry1Ac15 (Accession # AAN07788); Cry1Ac16 (Accession # AAU87037); Cry1Ac17 (Accession # AAX18704); Cry1Ac18 (Accession # AAY88347); Cry1Ac19 (Accession # ABD37053); Cry1Ac20 (Accession # ABB89046); Cry1Ac21 (Accession # AAY66992); Cry1Ac22 (Accession # ABZ01836); Cry1Ac23 (Accession # CAQ30431); Cry1Ac24 (Accession # ABL01535); Cry1Ac25 (Accession # FJ513324); Cry1Ac26 (Accession # FJ617446); Cry1Ac27 (Accession # FJ617447); Cry1Ac28 (Accession # ACM90319); Cry1Ac29 (Accession # DQ438941); Cry1Ac30 (Accession # GQ227507); Cry1Ac31 (Accession # GU446674); Cry1Ac32 (Accession # HM061081); Cry1Ac33 (Accession # GQ866913); Cry1Ac34 (Accession # HQ230364); Cry1Ac35 (Accession # JF340157); Cry1Ac36 (Accession # JN387137); Cry1Ac37 (Accession # JQ317685); Cry1Ad1 (Accession # AAA22340); Cry1Ad2 (Accession # CAA01880); Cry1Ae1 (Accession # AAA22410); Cry1Af1 (Accession # AAB82749); Cry1Ag1 (Accession # AAD46137); Cry1Ah1 (Accession # AAQ14326); Cry1Ah2 (Accession # ABB76664); Cry1Ah3 (Accession # HQ439779); Cry1Ai1 (Accession # AAO39719); Cry1Ai2 (Accession # HQ439780); Cry1A-like (Accession # AAK14339); Cry1Ba1 (Accession # CAA29898); Cry1Ba2 (Accession # CAA65003); Cry1Ba3 (Accession # AAK63251); Cry1Ba4 (Accession # AAK51084); Cry1Ba5 (Accession # ABO20894); Cry1Ba6 (Accession # ABL60921); Cry1Ba7 (Accession # HQ439781); Cry1Bb1 (Accession # AAA22344); Cry1Bb2 (Accession # HQ439782); Cry1Bc1 (Accession # CAA86568); Cry1Bd1 (Accession # AAD10292); Cry1Bd2 (Accession # AAM93496); Cry1Be1 (Accession # AAC32850); Cry1Be2 (Accession # AAQ52387); Cry1Be3 (Accession # ACV96720); Cry1Be4 (Accession # HM070026); Cry1Bf1 (Accession # CAC50778); Cry1Bf2 (Accession # AAQ52380); Cry1Bg1 (Accession # AAO39720); Cry1Bh1 (Accession # HQ589331); Cry1Bi1 (Accession # KC156700); Cry1Ca1 (Accession # CAA30396); Cry1Ca2 (Accession # CAA31951); Cry1Ca3 (Accession # AAA22343); Cry1Ca4 (Accession # CAA01886); Cry1Ca5 (Accession # CAA65457); Cry1Ca6 [1] (Accession # AAF37224); Cry1Ca7 (Accession # AAG50438); Cry1Ca8 (Accession # AAM00264); Cry1Ca9 (Accession # AAL79362); Cry1Ca10 (Accession # AAN16462); Cry1Ca11 (Accession # AAX53094); Cry1Ca12 (Accession # HM070027); Cry1Ca13 (Accession # HQ412621); Cry1Ca14 (Accession # JN651493); Cry1Cb1 (Accession # M97880); Cry1Cb2 (Accession # AAG35409); Cry1Cb3 (Accession # ACD50894); Cry1Cb-like (Accession # AAX63901); Cry1Da1 (Accession # CAA38099); Cry1Da2 (Accession #176415); Cry1Da3 (Accession # HQ439784); Cry1Db1 (Accession # CAA80234); Cry1Db2 (Accession # AAK48937); Cry1Dc1 (Accession # ABK35074); Cry1Ea1 (Accession # CAA37933); Cry1Ea2 (Accession # CAA39609); Cry1Ea3 (Accession # AAA22345); Cry1Ea4 (Accession # AAD04732); Cry1Ea5 (Accession # A15535); Cry1Ea6 (Accession # AAL50330); Cry1Ea7 (Accession # AAW72936); Cry1Ea8 (Accession # ABX11258); Cry1Ea9 (Accession # HQ439785); Cry1Ea10 (Accession # ADR00398); Cry1Ea11 (Accession # JQ652456); Cry1Eb1 (Accession # AAA22346); Cry1Fa1 (Accession # AAA22348); Cry1Fa2 (Accession # AAA22347); Cry1Fa3 (Accession # HM070028); Cry1Fa4 (Accession # HM439638); Cry1Fb1 (Accession # CAA80235); Cry1Fb2 (Accession # BAA25298); Cry1Fb3 (Accession # AAF21767); Cry1Fb4 (Accession # AAC10641); Cry1Fb5 (Accession # AAO13295); Cry1Fb6 (Accession # ACD50892); Cry1Fb7 (Accession # ACD50893); Cry1Ga1 (Accession # CAA80233); Cry1Ga2 (Accession # CAA70506); Cry1Gb1 (Accession # AAD10291); Cry1Gb2 (Accession # AAO13756); Cry1Gc1 (Accession # AAQ52381); Cry1Ha1 (Accession # CAA80236); Cry1Hb1 (Accession # AAA79694); Cry1Hb2 (Accession # HQ439786); Cry1H-like (Accession # AAF01213); Cry1Ia1 (Accession # CAA44633); Cry1Ia2 (Accession # AAA22354); Cry1Ia3 (Accession # AAC36999); Cry1Ia4 (Accession # AAB00958); Cry1Ia5 (Accession # CAA70124); Cry1Ia6 (Accession # AAC26910); Cry1Ia7 (Accession # AAM73516); Cry1Ia8 (Accession # AAK66742); Cry1Ia9 (Accession # AAQ08616); Cry1Ia10 (Accession # AAP86782); Cry1Ia11 (Accession # CAC85964); Cry1Ia12 (Accession # AAV53390); Cry1Ia13 (Accession # ABF83202); Cry1Ia14 (Accession # ACG63871); Cry1Ia15 (Accession # FJ617445); Cry1Ia16 (Accession # FJ617448); Cry1Ia17 (Accession # GU989199); Cry1Ia18 (Accession # ADK23801); Cry1Ia19 (Accession # HQ439787); Cry1Ia20 (Accession # JQ228426); Cry1Ia21 (Accession # JQ228424); Cry1Ia22 (Accession # JQ228427); Cry1Ia23 (Accession # JQ228428); Cry1Ia24 (Accession # JQ228429); Cry1Ia25 (Accession # JQ228430); Cry1Ia26 (Accession # JQ228431); Cry1Ia27 (Accession # JQ228432); Cry1Ia28 (Accession # JQ228433); Cry1Ia29 (Accession # JQ228434); Cry1Ia30 (Accession # JQ317686); Cry1Ia31 (Accession # JX944038); Cry1Ia32 (Accession # JX944039); Cry1Ia33 (Accession # JX944040); Cry1Ib1 (Accession # AAA82114); Cry1Ib2 (Accession # ABW88019); Cry1Ib3 (Accession # ACD75515); Cry1Ib4 (Accession # HM051227); Cry1Ib5 (Accession # HM070028); Cry1Ib6 (Accession # ADK38579); Cry1Ib7 (Accession # JN571740); Cry1Ib8 (Accession # JN675714); Cry1Ib9 (Accession # JN675715); Cry1Ib10 (Accession # JN675716); Cry1Ib11 (Accession # JQ228423); Cry1Ic1 (Accession # AAC62933); Cry1Ic2 (Accession # AAE71691); Cry1Id1 (Accession # AAD44366); Cry1Id2 (Accession # JQ228422); Cry1Ie1 (Accession # AAG43526); Cry1Ie2 (Accession # HM439636); Cry1Ie3 (Accession # KC156647); Cry1Ie4 (Accession # KC156681); Cry1If1 (Accession # AAQ52382); Cry1Ig1 (Accession # KC156701); Cry1l-like (Accession # AAC31094); Cry1l-like (Accession # ABG88859); Cry1Ja1 (Accession # AAA22341); Cry1Ja2 (Accession # HM070030); Cry1Ja3 (Accession # JQ228425); Cry1Jb1 (Accession # AAA98959); Cry1Jc1 (Accession # AAC31092); Cry1Jc2 (Accession # AAQ52372); Cry1Jd1 (Accession # CAC50779); Cry1Ka1 (Accession # AAB00376); Cry1Ka2 (Accession # HQ439783); Cry1La1 (Accession # AAS60191); Cry1La2 (Accession # HM070031); Cry1Ma1 (Accession # FJ884067); Cry1Ma2 (Accession # KC156659); Cry1Na1 (Accession # KC156648); Cry1Nb1 (Accession # KC156678); Cry1-like (Accession # AAC31091); Cry2Aa1 (Accession # AAA22335); Cry2Aa2 (Accession # AAA83516); Cry2Aa3 (Accession # D86064); Cry2Aa4 (Accession # AAC04867); Cry2Aa5 (Accession # CAA10671); Cry2Aa6 (Accession # CAA10672); Cry2Aa7 (Accession # CAA10670); Cry2Aa8 (Accession # AAO13734); Cry2Aa9 (Accession # AAO13750); Cry2Aa10 (Accession # AAQ04263); Cry2Aa11 (Accession # AAQ52384); Cry2Aa12 (Accession # ABI83671); Cry2Aa13 (Accession # ABL01536); Cry2Aa14 (Accession # ACF04939); Cry2Aa15 (Accession # JN426947); Cry2Ab1 (Accession # AAA22342); Cry2Ab2 (Accession # CAA39075); Cry2Ab3 (Accession # AAG36762); Cry2Ab4 (Accession # AAO13296); Cry2Ab5 (Accession # AAQ04609); Cry2Ab6 (Accession # AAP59457); Cry2Ab7 (Accession # AAZ66347); Cry2Ab8 (Accession # ABC95996); Cry2Ab9 (Accession # ABC74968); Cry2Ab10 (Accession # EF157306); Cry2Ab11 (Accession # CAM84575); Cry2Ab12 (Accession # ABM21764); Cry2Ab13 (Accession # ACG76120); Cry2Ab14 (Accession # ACG76121); Cry2Ab15 (Accession # HM037126); Cry2Ab16 (Accession # GQ866914); Cry2Ab17 (Accession # HQ439789); Cry2Ab18 (Accession # JN135255); Cry2Ab19 (Accession # JN135256); Cry2Ab20 (Accession # JN135257); Cry2Ab21 (Accession # JN135258); Cry2Ab22 (Accession # JN135259); Cry2Ab23 (Accession # JN135260); Cry2Ab24 (Accession # JN135261); Cry2Ab25 (Accession # JN415485); Cry2Ab26 (Accession # JN426946); Cry2Ab27 (Accession # JN415764); Cry2Ab28 (Accession # JN651494); Cry2Ac1 (Accession # CAA40536); Cry2Ac2 (Accession # AAG35410); Cry2Ac3 (Accession # AAQ52385); Cry2Ac4 (Accession # ABC95997); Cry2Ac5 (Accession # ABC74969); Cry2Ac6 (Accession # ABC74793); Cry2Ac7 (Accession # CAL18690); Cry2Ac8 (Accession # CAM09325); Cry2Ac9 (Accession # CAM09326); Cry2Ac10 (Accession # ABN15104); Cry2Ac11 (Accession # CAM83895); Cry2Ac12 (Accession # CAM83896); Cry2Ad1 (Accession # AAF09583); Cry2Ad2 (Accession # ABC86927); Cry2Ad3 (Accession # CAK29504); Cry2Ad4 (Accession # CAM32331); Cry2Ad5 (Accession # CA078739); Cry2Ae1 (Accession # AAQ52362); Cry2Af1 (Accession # ABO30519); Cry2Af2 (Accession # GQ866915); Cry2Ag1 (Accession # ACH91610); Cry2Ah1 (Accession # EU939453); Cry2Ah2 (Accession # ACL80665); Cry2Ah3 (Accession # GU073380); Cry2Ah4 (Accession # KC156702); Cry2Ai1 (Accession # FJ788388); Cry2Aj (Accession #); Cry2Ak1 (Accession # KC156660); Cry2Ba1 (Accession # KC156658); Cry3Aa1 (Accession # AAA22336); Cry3Aa2 (Accession # AAA22541); Cry3Aa3 (Accession # CAA68482); Cry3Aa4 (Accession # AAA22542); Cry3Aa5 (Accession # AAA50255); Cry3Aa6 (Accession # AAC43266); Cry3Aa7 (Accession # CAB41411); Cry3Aa8 (Accession # AAS79487); Cry3Aa9 (Accession # AAW05659); Cry3Aa10 (Accession # AAU29411); Cry3Aa11 (Accession # AAW82872); Cry3Aa12 (Accession # ABY49136); Cry3Ba1 (Accession # CAA34983); Cry3Ba2 (Accession # CAA00645); Cry3Ba3 (Accession # JQ397327); Cry3Bb1 (Accession # AAA22334); Cry3Bb2 (Accession # AAA74198); Cry3Bb3 (Accession #115475); Cry3Ca1 (Accession # CAA42469); Cry4Aa1 (Accession # CAA68485); Cry4Aa2 (Accession # BAA00179); Cry4Aa3 (Accession # CAD30148); Cry4Aa4 (Accession # AFB18317); Cry4A-like (Accession # AAY96321); Cry4Ba1 (Accession # CAA30312); Cry4Ba2 (Accession # CAA30114); Cry4Ba3 (Accession # AAA22337); Cry4Ba4 (Accession # BAA00178); Cry4Ba5 (Accession # CAD30095); Cry4Ba-like (Accession # ABC47686); Cry4Ca1 (Accession # EU646202); Cry4Cb1 (Accession # FJ403208); Cry4Cb2 (Accession # FJ597622); Cry4Cc1 (Accession # FJ403207); Cry5Aa1 (Accession # AAA67694); Cry5Ab1 (Accession # AAA67693); Cry5Ac1 (Accession #134543); Cry5Ad1 (Accession # ABQ82087); Cry5Ba1 (Accession # AAA68598); Cry5Ba2 (Accession # ABW88931); Cry5Ba3 (Accession # AFJ04417); Cry5Ca1 (Accession # HM461869); Cry5Ca2 (Accession # ZP_04123426); Cry5Da1 (Accession # HM461870); Cry5Da2 (Accession # ZP_04123980); Cry5Ea1 (Accession # HM485580); Cry5Ea2 (Accession # ZP_04124038); Cry6Aa1 (Accession # AAA22357); Cry6Aa2 (Accession # AAM46849); Cry6Aa3 (Accession # ABH03377); Cry6Ba1 (Accession # AAA22358); Cry7Aa1 (Accession # AAA22351); Cry7Ab1 (Accession # AAA21120); Cry7Ab2 (Accession # AAA21121); Cry7Ab3 (Accession # ABX24522); Cry7Ab4 (Accession # EU380678); Cry7Ab5 (Accession # ABX79555); Cry7Ab6 (Accession # ACI44005); Cry7Ab7 (Accession # ADB89216); Cry7Ab8 (Accession # GU145299); Cry7Ab9 (Accession # ADD92572); Cry7Ba1 (Accession # ABB70817); Cry7Bb1 (Accession # KC156653); Cry7Ca1 (Accession # ABR67863); Cry7Cb1 (Accession # KC156698); Cry7Da1 (Accession # ACQ99547); Cry7Da2 (Accession # HM572236); Cry7Da3 (Accession # KC156679); Cry7Ea1 (Accession # HM035086); Cry7Ea2 (Accession # HM132124); Cry7Ea3 (Accession # EEM19403); Cry7Fa1 (Accession # HM035088); Cry7Fa2 (Accession # EEM19090); Cry7Fb1 (Accession # HM572235); Cry7Fb2 (Accession # KC156682); Cry7Ga1 (Accession # HM572237); Cry7Ga2 (Accession # KC156669); Cry7Gb1 (Accession # KC156650); Cry7Gc1 (Accession # KC156654); Cry7Gd1 (Accession # KC156697); Cry7Ha1 (Accession # KC156651); Cry7Ia1 (Accession # KC156665); Cry7Ja1 (Accession # KC156671); Cry7Ka1 (Accession # KC156680); Cry7Kb1 (Accession # BAM99306); Cry7La1 (Accession # BAM99307); Cry8Aa1 (Accession # AAA21117); Cry8Ab1 (Accession # EU044830); Cry8Ac1 (Accession # KC156662); Cry8Ad1 (Accession # KC156684); Cry8Ba1 (Accession # AAA21118); Cry8Bb1 (Accession # CAD57542); Cry8Bc1 (Accession # CAD57543); Cry8Ca1 (Accession # AAA21119); Cry8Ca2 (Accession # AAR98783); Cry8Ca3 (Accession # EU625349); Cry8Ca4 (Accession # ADB54826); Cry8Da1 (Accession # BAC07226); Cry8Da2 (Accession # BD133574); Cry8Da3 (Accession # BD133575); Cry8Db1 (Accession # BAF93483); Cry8Ea1 (Accession # AAQ73470); Cry8Ea2 (Accession # EU047597); Cry8Ea3 (Accession # KC855216); Cry8Fa1 (Accession # AAT48690); Cry8Fa2 (Accession # HQ174208); Cry8Fa3 (Accession # AFH78109); Cry8Ga1 (Accession # AAT46073); Cry8Ga2 (Accession # ABC42043); Cry8Ga3 (Accession # FJ198072); Cry8Ha1 (Accession # AAW81032); Cry8Ia1 (Accession # EU381044); Cry8Ia2 (Accession # GU073381); Cry8Ia3 (Accession # HM044664); Cry8Ia4 (Accession # KC156674); Cry8Ib1 (Accession # GU325772); Cry8Ib2 (Accession # KC156677); Cry8Ja1 (Accession # EU625348); Cry8Ka1 (Accession # FJ422558); Cry8Ka2 (Accession # ACN87262); Cry8Kb1 (Accession # HM123758); Cry8Kb2 (Accession # KC156675); Cry8La1 (Accession # GU325771); Cry8Ma1 (Accession # HM044665); Cry8Ma2 (Accession # EEM86551); Cry8Ma3 (Accession # HM210574); Cry8Na1 (Accession # HM640939); Cry8Pal (Accession # HQ388415); Cry8Qa1 (Accession # HQ441166); Cry8Qa2 (Accession # KC152468); Cry8Ra1 (Accession # AFP87548); Cry8Sa1 (Accession # JQ740599); Cry8Ta1 (Accession # KC156673); Cry8-like (Accession # FJ770571); Cry8-like (Accession # ABS53003); Cry9Aa1 (Accession # CAA41122); Cry9Aa2 (Accession # CAA41425); Cry9Aa3 (Accession # GQ249293); Cry9Aa4 (Accession # GQ249294); Cry9Aa5 (Accession # JX174110); Cry9Aa like (Accession # AAQ52376); Cry9Ba1 (Accession # CAA52927); Cry9Ba2 (Accession # GU299522); Cry9Bb1 (Accession # AAV28716); Cry9Ca1 (Accession # CAA85764); Cry9Ca2 (Accession # AAQ52375); Cry9Da1 (Accession # BAA19948); Cry9Da2 (Accession # AAB97923); Cry9Da3 (Accession # GQ249293); Cry9Da4 (Accession # GQ249297); Cry9Db1 (Accession # AAX78439); Cry9Dc1 (Accession # KC156683); Cry9Ea1 (Accession # BAA34908); Cry9Ea2 (Accession # AAO12908); Cry9Ea3 (Accession # ABM21765); Cry9Ea4 (Accession # ACE88267); Cry9Ea5 (Accession # ACF04743); Cry9Ea6 (Accession # ACG63872); Cry9Ea7 (Accession # FJ380927); Cry9Ea8 (Accession # GQ249292); Cry9Ea9 (Accession # JN651495); Cry9Eb1 (Accession # CAC50780); Cry9Eb2 (Accession # GQ249298); Cry9Eb3 (Accession # KC156646); Cry9Ec1 (Accession # AAC63366); Cry9Ed1 (Accession # AAX78440); Cry9Ee1 (Accession # GQ249296); Cry9Ee2 (Accession # KC156664); Cry9Fa1 (Accession # KC156692); Cry9Ga1 (Accession # KC156699); Cry9-like (Accession # AAC63366); Cry10Aa1 (Accession # AAA22614); Cry10Aa2 (Accession # E00614); Cry10Aa3 (Accession # CAD30098); Cry10Aa4 (Accession # AFB18318); Cry10A-like (Accession # DQ167578); Cry11Aa1 (Accession # AAA22352); Cry11Aa2 (Accession # AAA22611); Cry11Aa3 (Accession # CAD30081); Cry11Aa4 (Accession # AFB18319); Cry11Aa-like (Accession # DQ166531); Cry11Ba1 (Accession # CAA60504); Cry11Bb1 (Accession # AAC97162); Cry11Bb2 (Accession # HM068615); Cry12Aa1 (Accession # AAA22355); Cry13Aa1 (Accession # AAA22356); Cry14Aa1 (Accession # AAA21516); Cry14Ab1 (Accession # KC156652); Cry15Aa1 (Accession # AAA22333); Cry16Aa1 (Accession # CAA63860); Cry17Aa1 (Accession # CAA67841); Cry18Aa1 (Accession # CAA67506); Cry18Ba1 (Accession # AAF89667); Cry18Ca1 (Accession # AAF89668); Cry19Aa1 (Accession # CAA68875); Cry19Ba1 (Accession # BAA32397); Cry19Ca1 (Accession # AFM37572); Cry20Aa1 (Accession # AAB93476); Cry20Ba1 (Accession # ACS93601); Cry20Ba2 (Accession # KC156694); Cry20-like (Accession # GQ144333); Cry21Aa1 (Accession #132932); Cry21Aa2 (Accession #166477); Cry21Ba1 (Accession # BAC06484); Cry21Ca1 (Accession # JF521577); Cry21Ca2 (Accession # KC156687); Cry21Da1 (Accession # JF521578); Cry22Aa1 (Accession #134547); Cry22Aa2 (Accession # CAD43579); Cry22Aa3 (Accession # ACD93211); Cry22Ab1 (Accession # AAK50456); Cry22Ab2 (Accession # CAD43577); Cry22Ba1 (Accession # CAD43578); Cry22Bb1 (Accession # KC156672); Cry23Aa1 (Accession # AAF76375); Cry24Aa1 (Accession # AAC61891); Cry24Ba1 (Accession # BAD32657); Cry24Ca1 (Accession # CAJ43600); Cry25Aa1 (Accession # AAC61892); Cry26Aa1 (Accession # AAD25075); Cry27Aa1 (Accession # BAA82796); Cry28Aa1 (Accession # AAD24189); Cry28Aa2 (Accession # AAG00235); Cry29Aa1 (Accession # CAC80985); Cry30Aa1 (Accession # CAC80986); Cry30Ba1 (Accession # BAD00052); Cry30Ca1 (Accession # BAD67157); Cry30Ca2 (Accession # ACU24781); Cry30Da1 (Accession # EF095955); Cry30Db1 (Accession # BAE80088); Cry30Ea1 (Accession # ACC95445); Cry30Ea2 (Accession # FJ499389); Cry30Fa1 (Accession # ACI22625); Cry30Ga1 (Accession # ACG60020); Cry30Ga2 (Accession # HQ638217); Cry31Aa1 (Accession # BAB11757); Cry31Aa2 (Accession # AAL87458); Cry31Aa3 (Accession # BAE79808); Cry31Aa4 (Accession # BAF32571); Cry31Aa5 (Accession # BAF32572); Cry31Aa6 (Accession # BAI44026); Cry31Ab1 (Accession # BAE79809); Cry31Ab2 (Accession # BAF32570); Cry31Ac1 (Accession # BAF34368); Cry31Ac2 (Accession # AB731600); Cry31Ad1 (Accession # BAI44022); Cry32Aa1 (Accession # AAG36711); Cry32Aa2 (Accession # GU063849); Cry32Ab1 (Accession # GU063850); Cry32Ba1 (Accession # BAB78601); Cry32Ca1 (Accession # BAB78602); Cry32Cb1 (Accession # KC156708); Cry32Da1 (Accession # BAB78603); Cry32Ea1 (Accession # GU324274); Cry32Ea2 (Accession # KC156686); Cry32Eb1 (Accession # KC156663); Cry32Fa1 (Accession # KC156656); Cry32Ga1 (Accession # KC156657); Cry32Ha1 (Accession # KC156661); Cry32Hb1 (Accession # KC156666); Cry32Ia1 (Accession # KC156667); Cry32Ja1 (Accession # KC156685); Cry32Ka1 (Accession # KC156688); Cry32La1 (Accession # KC156689); Cry32Ma1 (Accession # KC156690); Cry32Mb1 (Accession # KC156704); Cry32Na1 (Accession # KC156691); Cry32Oa1 (Accession # KC156703); Cry32Pa1 (Accession # KC156705); Cry32Qa1 (Accession # KC156706); Cry32Ra1 (Accession # KC156707); Cry32Sa1 (Accession # KC156709); Cry32Ta1 (Accession # KC156710); Cry32Ua1 (Accession # KC156655); Cry33Aa1 (Accession # AAL26871); Cry34Aa1 (Accession # AAG50341); Cry34Aa2 (Accession # AAK64560); Cry34Aa3 (Accession # AAT29032); Cry34Aa4 (Accession # AAT29030); Cry34Ab1 (Accession # AAG41671); Cry34Ac1 (Accession # AAG50118); Cry34Ac2 (Accession # AAK64562); Cry34Ac3 (Accession # AAT29029); Cry34Ba1 (Accession # AAK64565); Cry34Ba2 (Accession # AAT29033); Cry34Ba3 (Accession # AAT29031); Cry35Aa1 (Accession # AAG50342); Cry35Aa2 (Accession # AAK64561); Cry35Aa3 (Accession # AAT29028); Cry35Aa4 (Accession # AAT29025); Cry35Ab1 (Accession # AAG41672); Cry35Ab2 (Accession # AAK64563); Cry35Ab3 (Accession # AY536891); Cry35Ac1 (Accession # AAG50117); Cry35Ba1 (Accession # AAK64566); Cry35Ba2 (Accession # AAT29027); Cry35Ba3 (Accession # AAT29026); Cry36Aa1 (Accession # AAK64558); Cry37Aa1 (Accession # AAF76376); Cry38Aa1 (Accession # AAK64559); Cry39Aa1 (Accession # BAB72016); Cry40Aa1 (Accession # BAB72018); Cry40Ba1 (Accession # BAC77648); Cry40Ca1 (Accession # EU381045); Cry40 Da1 (Accession # ACF15199); Cry41Aa1 (Accession # BAD35157); Cry41Ab1 (Accession # BAD35163); Cry41Ba1 (Accession # HM461871); Cry41Ba2 (Accession # ZP_04099652); Cry42Aa1 (Accession # BAD35166); Cry43Aa1 (Accession # BAD15301); Cry43Aa2 (Accession # BAD95474); Cry43Ba1 (Accession # BAD15303); Cry43Ca1 (Accession # KC156676); Cry43Cb1 (Accession # KC156695); Cry43Cc1 (Accession # KC156696); Cry43-like (Accession # BAD15305); Cry44Aa (Accession # BAD08532); Cry45Aa (Accession # BAD22577); Cry46Aa (Accession # BAC79010); Cry46Aa2 (Accession # BAG68906); Cry46Ab (Accession # BAD35170); Cry47Aa (Accession # AAY24695); Cry48Aa (Accession # CAJ18351); Cry48Aa2 (Accession # CAJ86545); Cry48Aa3 (Accession # CAJ86546); Cry48Ab (Accession # CAJ86548); Cry48Ab2 (Accession # CAJ86549); Cry49Aa (Accession # CAH56541); Cry49Aa2 (Accession # CAJ86541); Cry49Aa3 (Accession # CAJ86543); Cry49Aa4 (Accession # CAJ86544); Cry49Ab1 (Accession # CAJ86542); Cry50Aa1 (Accession # BAE86999); Cry50Ba1 (Accession # GU446675); Cry50Ba2 (Accession # GU446676); Cry51Aa1 (Accession # ABI14444); Cry51Aa2 (Accession # GU570697); Cry52Aa1 (Accession # EF613489); Cry52Ba1 (Accession # FJ361760); Cry53Aa1 (Accession # EF633476); Cry53Ab1 (Accession # FJ361759); Cry54Aa1 (Accession # ACA52194); Cry54Aa2 (Accession # GQ140349); Cry54Ba1 (Accession # GU446677); Cry55Aa1 (Accession # ABW88932); Cry54Ab1 (Accession # JQ916908); Cry55Aa2 (Accession # AAE33526); Cry56Aa1 (Accession # ACU57499); Cry56Aa2 (Accession # GQ483512); Cry56Aa3 (Accession # JX025567); Cry57Aa1 (Accession # ANC87261); Cry58Aa1 (Accession # ANC87260); Cry59Ba1 (Accession # JN790647); Cry59Aa1 (Accession # ACR43758); Cry60Aa1 (Accession # ACU24782); Cry60Aa2 (Accession # EAO57254); Cry60Aa3 (Accession # EEM99278); Cry60Ba1 (Accession # GU810818); Cry60Ba2 (Accession # EAO57253); Cry60Ba3 (Accession # EEM99279); Cry61Aa1 (Accession # HM035087); Cry61Aa2 (Accession # HM132125); Cry61Aa3 (Accession # EEM19308); Cry62Aa1 (Accession # HM054509); Cry63Aa1 (Accession # BAI44028); Cry64Aa1 (Accession # BAJ05397); Cry65Aa1 (Accession # HM461868); Cry65Aa2 (Accession # ZP_04123838); Cry66Aa1 (Accession # HM485581); Cry66Aa2 (Accession # ZP_04099945); Cry67Aa1 (Accession # HM485582); Cry67Aa2 (Accession # ZP_04148882); Cry68Aa1 (Accession # HQ113114); Cry69Aa1 (Accession # HQ401006); Cry69Aa2 (Accession # JQ821388); Cry69Ab1 (Accession # JN209957); Cry70Aa1 (Accession # JN646781); Cry70Ba1 (Accession # ADO51070); Cry70Bb1 (Accession # EEL67276); Cry71Aa1 (Accession # JX025568); Cry72Aa1 (Accession # JX025569).

[0163] Examples of δ-endotoxins also include but are not limited to Cry1A proteins of U.S. Pat. Nos. 5,880,275 and 7,858,849; a DIG-3 or DIG-11 toxin (N-terminal deletion of α-helix 1 and/or α-helix 2 variants of Cry proteins such as Cry1A) of U.S. Pat. Nos. 8,304,604 and 8,304,605, Cry1B of U.S. patent application Ser. No. 10/525,318; Cry1C of U.S. Pat. No. 6,033,874; Cry1F of U.S. Pat. Nos. 5,188,960, 6,218,188; Cry1A/F chimeras of U.S. Pat. Nos. 7,070,982; 6,962,705 and 6,713,063); a Cry2 protein such as Cry2Ab protein of U.S. Pat. No. 7,064,249); a Cry3A protein including but not limited to an engineered hybrid insecticidal protein (eHIP) created by fusing unique combinations of variable regions and conserved blocks of at least two different Cry proteins (US Patent Application Publication Number 2010/0017914); a Cry4 protein; a Cry5 protein; a Cry6 protein; Cry8 proteins of U.S. Pat. Nos. 7,329,736, 7,449,552, 7,803,943, 7,476,781, 7,105,332, 7,378,499 and 7,462,760; a Cry9 protein such as such as members of the Cry9A, Cry9B, Cry9C, Cry9D, Cry9E, and Cry9F families; a Cry15 protein of Naimov, et al., (2008) Applied and Environmental Microbiology 74:7145-7151; a Cry22, a Cry34Ab1 protein of U.S. Pat. Nos. 6,127,180, 6,624,145 and 6,340,593; a CryET33 and CryET34 protein of U.S. Pat. Nos. 6,248,535, 6,326,351, 6,399,330, 6,949,626, 7,385,107 and 7,504,229; a CryET33 and CryET34 homologs of US Patent Publication Number 2006/0191034, 2012/0278954, and PCT Publication Number WO 2012/139004; a Cry35Ab1 protein of U.S. Pat. Nos. 6,083,499, 6,548,291 and 6,340,593; a Cry46 protein, a Cry 51 protein, a Cry binary toxin; a TIC901 or related toxin; TIC807 of US 2008/0295207; ET29, ET37, TIC809, TIC810, TIC812, TIC127, TIC128 of PCT US 2006/033867; TIC1100, TIC 860, a TIC867, a TIC868, TIC869, and TIC836 of US Patent Publication Number 2016/0108428. AXMI-027, AXMI-036, and AXMI-038 of U.S. Pat. No. 8,236,757; AXMI-031, AXMI-039, AXMI-040, AXMI-049 of U.S. Pat. No. 7,923,602; AXMI-018, AXMI-020, and AXMI-021 of WO 2006/083891; AXMI-010 of WO 2005/038032; AXMI-003 of WO 2005/021585; AXMI-008 of US 2004/0250311; AXMI-006 of US 2004/0216186; AXMI-007 of US 2004/0210965; AXMI-009 of US 2004/0210964; AXMI-014 of US 2004/0197917; AXMI-004 of US 2004/0197916; AXMI-028 and AXMI-029 of WO 2006/119457; AXMI-007, AXMI-008, AXMI-0080rf2, AXMI-009, AXMI-014 and AXMI-004 of WO 2004/074462; AXMI-150 of U.S. Pat. No. 8,084,416; AXMI-205 of US20110023184; AXMI-011, AXMI-012, AXMI-013, AXMI-015, AXMI-019, AXMI-044, AXMI-037, AXMI-043, AXMI-033, AXMI-034, AXMI-022, AXMI-023, AXMI-041, AXMI-063, and AXMI-064 of US 2011/0263488; AXMI-R1 and related proteins of US 2010/0197592; AXMI221Z, AXMI222z, AXMI223z, AXMI224z and AXMI225z of WO 2011/103248; AXMI218, AXMI219, AXMI220, AXMI226, AXMI227, AXMI228, AXMI229, AXMI230, and AXMI231 of WO11/103247; AXMI-115, AXMI-113, AXMI-005, AXMI-163 and AXMI-184 of U.S. Pat. No. 8,334,431; AXMI-001, AXMI-002, AXMI-030, AXMI-035, and AXMI-045 of US 2010/0298211; AXMI-066 and AXMI-076 of US20090144852; AXMI128, AXMI130, AXMI131, AXMI133, AXMI140, AXMI141, AXMI142, AXMI143, AXMI144, AXMI146, AXMI148, AXMI149, AXMI152, AXMI153, AXMI154, AXMI155, AXMI156, AXMI157, AXMI158, AXMI162, AXMI165, AXMI166, AXMI167, AXMI168, AXMI169, AXMI170, AXMI171, AXMI172, AXMI173, AXMI174, AXMI175, AXMI176, AXMI177, AXMI178, AXMI179, AXMI180, AXMI181, AXMI182, AXMI185, AXMI186, AXMI187, AXMI188, AXMI189 of U.S. Pat. No. 8,318,900; AXMI079, AXMI080, AXMI081, AXMI082, AXMI091, AXMI092, AXMI096, AXMI097, AXMI098, AXMI099, AXMI100, AXMI101, AXMI102, AXMI103, AXMI104, AXMI107, AXMI108, AXMI109, AXMI110, AXMI111, AXMI112, AXMI114, AXMI116, AXMI117, AXMI118, AXMI119, AXMI120, AXMI121, AXMI122, AXMI123, AXMI124, AXMI1257, AXMI1268, AXMI127, AXMI129, AXMI164, AXMI151, AXMI161, AXMI183, AXMI132, AXMI138, AXMI137 of US 2010/0005543; and Cry proteins such as Cry1A and Cry3A having modified proteolytic sites of U.S. Pat. No. 8,319,019; a Cry1Ac, Cry2Aa and Cry1Ca toxin protein from Bacillus thuringiensis strain VBTS 2528 of US Patent Application Publication Number 2011/0064710, and an IP1B of PCT publication number WO 2016/061197. Other Cry proteins are well known to one skilled in the art (see, Crickmore, et al., “Bacillus thuringiensis toxin nomenclature” (2011), at lifesci.sussex.ac.uk/home/Neil_Crickmore/Bt/ which can be accessed on the world-wide web using the “www” prefix). The insecticidal activity of Cry proteins is well known to one skilled in the art (for review, see, van Frannkenhuyzen, (2009) J. Invert. Path. 101:1-16). The use of Cry proteins as transgenic plant traits is well known to one skilled in the art and Cry-transgenic plants including but not limited to Cry1Ac, Cry1Ac+Cry2Ab, Cry1Ab, Cry1A.105, Cry1F, Cry1Fa2, Cry1F+Cry1Ac, Cry2Ab, Cry3A, mCry3A, Cry3Bb1, Cry34Ab1, Cry35Ab1, Vip3A, mCry3A, Cry9c and CBI-Bt have received regulatory approval (see, Sanahuja, (2011) Plant Biotech Journal 9:283-300 and the CERA (2010) GM Crop Database Center for Environmental Risk Assessment (CERA), ILSI Research Foundation, Washington D.C. at cera-gmc.org/index.php?action=gm_crop_database which can be accessed on the world-wide web using the “www” prefix). More than one pesticidal proteins well known to one skilled in the art can also be expressed in plants such as Vip3Ab & Cry1Fa (US2012/0317682), Cry1BE & Cry1F (US2012/0311746), Cry1CA & Cry1AB (US2012/0311745), Cry1F & CryCa (US2012/0317681), Cry1DA & Cry1BE (US2012/0331590), Cry1DA & Cry1Fa (US2012/0331589), Cry1AB & Cry1BE (US2012/0324606), and Cry1Fa & Cry2Aa, Cry1l or Cry1E (US2012/0324605)); Cry34Ab/35Ab and Cry6Aa (US20130167269); Cry34Ab/VCry35Ab & Cry3Aa (US20130167268); Cry3A and Cry1Ab or Vip3Aa (US20130116170); and Cry1F, Cry34Ab1, and Cry35Ab1 (PCT/US2010/060818). Pesticidal proteins also include insecticidal lipases including lipid acyl hydrolases of U.S. Pat. No. 7,491,869, and cholesterol oxidases such as from Streptomyces (Purcell et al. (1993) Biochem Biophys Res Commun 15:1406-1413). Pesticidal proteins also include VIP (vegetative insecticidal proteins) toxins of U.S. Pat. Nos. 5,877,012, 6,107,279, 6,137,033, 7,244,820, 7,615,686, and 8,237,020, and the like. Other VIP proteins are well known to one skilled in the art (see, lifesci.sussex.ac.uk/home/Neil_Crickmore/Bt/vip.html which can be accessed on the world-wide web using the “www” prefix). Pesticidal proteins also include toxin complex (TC) proteins, obtainable from organisms such as Xenorhabdus, Photorhabdus and Paenibacillus (see, U.S. Pat. Nos. 7,491,698 and 8,084,418). Some TC proteins have “stand alone” insecticidal activity and other TC proteins enhance the activity of the stand-alone toxins produced by the same given organism. The toxicity of a “stand-alone” TC protein (from Photorhabdus, Xenorhabdus or Paenibacillus, for example) can be enhanced by one or more TC protein “potentiators” derived from a source organism of a different genus. There are three main types of TC proteins. As referred to herein, Class A proteins (“Protein A”) are stand-alone toxins. Class B proteins (“Protein B”) and Class C proteins (“Protein C”) enhance the toxicity of Class A proteins. Examples of Class A proteins are TcbA, TcdA, XptA1 and XptA2. Examples of Class B proteins are TcaC, TcdB, XptB1Xb and XptC1Wi. Examples of Class C proteins are TccC, XptC1Xb and XptB1Wi. Pesticidal proteins also include spider, snake and scorpion venom proteins. Examples of spider venom peptides include but are not limited to lycotoxin-1 peptides and mutants thereof (U.S. Pat. No. 8,334,366).

[0164] (C) A polynucleotide encoding an insect-specific hormone or pheromone such as an ecdysteroid and juvenile hormone, a variant thereof, a mimetic based thereon or an antagonist or agonist thereof. See, for example, the disclosure by Hammock, et al., (1990) Nature 344:458, of baculovirus expression of cloned juvenile hormone esterase, an inactivator of juvenile hormone.

[0165] (D) A polynucleotide encoding an insect-specific peptide which, upon expression, disrupts the physiology of the affected pest. For example, see the disclosures of, Regan, (1994) J. Biol. Chem. 269:9 (expression cloning yields DNA coding for insect diuretic hormone receptor); Pratt, et al., (1989) Biochem. Biophys. Res. Comm 163:1243 (an allostatin is identified in Diploptera puntata); Chattopadhyay, et al., (2004) Critical Reviews in Microbiology 30(1):33-54; Zjawiony, (2004) J Nat Prod 67(2):300-310; Carlini and Grossi-de-Sa, (2002) Toxicon 40(11):1515-1539; Ussuf, et al., (2001) Curr Sci. 80(7):847-853 and Vasconcelos and Oliveira, (2004) Toxicon 44(4):385-403. See also, U.S. Pat. No. 5,266,317 to Tomalski, et al., who disclose genes encoding insect-specific toxins.

[0166] (E) A polynucleotide encoding an enzyme responsible for a hyperaccumulation of a monoterpene, a sesquiterpene, a steroid, hydroxamic acid, a phenylpropanoid derivative or another non-protein molecule with insecticidal activity.

[0167] (F) A polynucleotide encoding an enzyme involved in the modification, including the post-translational modification, of a biologically active molecule; for example, a glycolytic enzyme, a proteolytic enzyme, a lipolytic enzyme, a nuclease, a cyclase, a transaminase, an esterase, a hydrolase, a phosphatase, a kinase, a phosphorylase, a polymerase, an elastase, a chitinase and a glucanase, whether natural or synthetic. See, PCT Application WO 1993/02197 in the name of Scott, et al., which discloses the nucleotide sequence of a callase gene. DNA molecules which contain chitinase-encoding sequences can be obtained, for example, from the ATCC under Accession Numbers 39637 and 67152. See also, Kramer, et al., (1993) Insect Biochem. Molec. Biol. 23:691, who teach the nucleotide sequence of a cDNA encoding tobacco hookworm chitinase and Kawalleck, et al., (1993) Plant Molec. Biol. 21:673, who provide the nucleotide sequence of the parsley ubi4-2 polyubiquitin gene, and U.S. Pat. Nos. 6,563,020; 7,145,060 and 7,087,810.

[0168] (G) A polynucleotide encoding a molecule that stimulates signal transduction. For example, see the disclosure by Botella, et al., (1994) Plant Molec. Biol. 24:757, of nucleotide sequences for mung bean calmodulin cDNA clones, and Griess, et al., (1994) Plant Physiol. 104:1467, who provide the nucleotide sequence of a maize calmodulin cDNA clone.

[0169] (H) A polynucleotide encoding a hydrophobic moment peptide. See, PCT Application WO 1995/16776 and U.S. Pat. No. 5,580,852 disclosure of peptide derivatives of Tachyplesin which inhibit fungal plant pathogens) and PCT Application WO 1995/18855 and U.S. Pat. No. 5,607,914 (teaches synthetic antimicrobial peptides that confer disease resistance).

[0170] (I) A polynucleotide encoding a membrane permease, a channel former or a channel blocker. For example, see the disclosure by Jaynes, et al., (1993) Plant Sci. 89:43, of heterologous expression of a cecropin-beta lytic peptide analog to render transgenic tobacco plants resistant to Pseudomonas solanacearum.

[0171] (J) A gene encoding a viral-invasive protein or a complex toxin derived therefrom. For example, the accumulation of viral coat proteins in transformed plant cells imparts resistance to viral infection and/or disease development effected by the virus from which the coat protein gene is derived, as well as by related viruses. See, Beachy, et al., (1990) Ann. Rev. Phytopathol. 28:451. Coat protein-mediated resistance has been conferred upon transformed plants against alfalfa mosaic virus, cucumber mosaic virus, tobacco streak virus, potato virus X, potato virus Y, tobacco etch virus, tobacco rattle virus and tobacco mosaic virus. Id.

[0172] (K) A gene encoding an insect-specific antibody or an immunotoxin derived therefrom. Thus, an antibody targeted to a critical metabolic function in the insect gut would inactivate an affected enzyme, killing the insect. Cf. Taylor, et al., Abstract #497, SEVENTH INT'L SYMPOSIUM ON MOLECULAR PLANT-MICROBE INTERACTIONS (Edinburgh, Scotland, 1994) (enzymatic inactivation in transgenic tobacco via production of single-chain antibody fragments).

[0173] (L) A gene encoding a virus-specific antibody. See, for example, Tavladoraki, et al., (1993) Nature 366:469, who show that transgenic plants expressing recombinant antibody genes are protected from virus attack.

[0174] (M) A polynucleotide encoding a developmental-arrestive protein produced in nature by a pathogen or a parasite. Thus, fungal endo alpha-1,4-D-polygalacturonases facilitate fungal colonization and plant nutrient release by solubilizing plant cell wall homo-alpha-1,4-D-galacturonase. See, Lamb, et al., (1992) Bio/Technology 10:1436. The cloning and characterization of a gene which encodes a bean endopolygalacturonase-inhibiting protein is described by Toubart, et al., (1992) Plant J. 2:367.

[0175] (N) A polynucleotide encoding a developmental-arrestive protein produced in nature by a plant. For example, Logemann, et al., (1992) Bio/Technology 10:305, have shown that transgenic plants expressing the barley ribosome-inactivating gene have an increased resistance to fungal disease.

[0176] (O) Genes involved in the Systemic Acquired Resistance (SAR) Response and/or the pathogenesis related genes. Briggs, (1995) Current Biology 5(2), Pieterse and Van Loon, (2004) Curr. Opin. Plant Bio. 7(4):456-64 and Somssich, (2003) Cell 113(7):815-6.

[0177] (P) Antifungal genes (Cornelissen and Melchers, (1993) Pl. Physiol. 101:709-712 and Parijs, et al., (1991) Planta 183:258-264 and Bushnell, et al., (1998) Can. J. of Plant Path. 20(2):137-149. Also see, U.S. patent application Ser. Nos. 09/950,933; 11/619,645; 11/657,710; 11/748,994; 11/774,121 and U.S. Pat. Nos. 6,891,085 and 7,306,946. LysM Receptor-like kinases for the perception of chitin fragments as a first step in plant defense response against fungal pathogens (US 2012/0110696).

[0178] (Q) Detoxification genes, such as for fumonisin, beauvericin, moniliformin and zearalenone and their structurally related derivatives. For example, see, U.S. Pat. Nos. 5,716,820; 5,792,931; 5,798,255; 5,846,812; 6,083,736; 6,538,177; 6,388,171 and 6,812,380.

[0179] (R) A polynucleotide encoding a Cystatin and cysteine proteinase inhibitors. See, U.S. Pat. No. 7,205,453.

[0180] (S) Defensin genes. See, WO 2003/000863 and U.S. Pat. Nos. 6,911,577; 6,855,865; 6,777,592 and 7,238,781.

[0181] (T) Genes conferring resistance to nematodes. See, e.g., PCT Application WO 1996/30517; PCT Application WO 1993/19181, WO 2003/033651 and Urwin, et al., (1998) Planta 204:472-479, Williamson, (1999) Curr Opin Plant Bio. 2(4):327-31; U.S. Pat. Nos. 6,284,948 and 7,301,069 and miR164 genes (WO 2012/058266).

[0182] (U) Genes that confer resistance to Phytophthora Root Rot, such as the Rps 1, Rps 1-a, Rps 1-b, Rps 1-c, Rps 1-d, Rps 1-e, Rps 1-k, Rps 2, Rps 3-a, Rps 3-b, Rps 3-c, Rps 4, Rps 5, Rps 6, Rps 7 and other Rps genes. See, for example, Shoemaker, et al., Phytophthora Root Rot Resistance Gene Mapping in Soybean, Plant Genome IV Conference, San Diego, Calif. (1995).

[0183] (V) Genes that confer resistance to Brown Stem Rot, such as described in U.S. Pat. No. 5,689,035 and incorporated by reference for this purpose.

[0184] (W) Genes that confer resistance to Colletotrichum, such as described in US Patent Application Publication US 2009/0035765 and incorporated by reference for this purpose. This includes the Rcg locus that may be utilized as a single locus conversion.

[0185] (X) Some embodiments relate to down-regulation of expression of target genes in insect pest species by interfering ribonucleic acid (RNA) molecules. PCT Publication WO 2007/074405 describes methods of inhibiting expression of target genes in invertebrate pests including Colorado potato beetle. PCT Publication WO 2005/110068 describes methods of inhibiting expression of target genes in invertebrate pests including in particular Western corn rootworm as a means to control insect infestation. Furthermore, PCT Publication WO 2009/091864 describes compositions and methods for the suppression of target genes from insect pest species including pests from the Lygus genus.

[0186] Nucleic acid molecules including silencing elements for targeting the vacuolar ATPase H subunit, useful for controlling a coleopteran pest population and infestation as described in US Patent Application Publication 2012/0198586. PCT Publication WO 2012/055982 describes ribonucleic acid (RNA or double stranded RNA) that inhibits or down regulates the expression of a target gene that encodes: an insect ribosomal protein such as the ribosomal protein L19, the ribosomal protein L40 or the ribosomal protein S27A; an insect proteasome subunit such as the Rpn6 protein, the Pros 25, the Rpn2 protein, the proteasome beta 1 subunit protein or the Pros beta 2 protein; an insect β-coatomer of the COPI vesicle, the γ-coatomer of the COPI vesicle, the β′-coatomer protein or the ζ-coatomer of the COPI vesicle; an insect Tetraspanine 2 A protein which is a putative transmembrane domain protein; an insect protein belonging to the actin family such as Actin 5C; an insect ubiquitin-5E protein; an insect Sec23 protein which is a GTPase activator involved in intracellular protein transport; an insect crinkled protein which is an unconventional myosin which is involved in motor activity; an insect crooked neck protein which is involved in the regulation of nuclear alternative mRNA splicing; an insect vacuolar H+-ATPase G-subunit protein and an insect Tbp-1 such as Tat-binding protein. PCT publication WO 2007/035650 describes ribonucleic acid (RNA or double stranded RNA) that inhibits or down regulates the expression of a target gene that encodes Snf7. US Patent Application publication 2011/0054007 describes polynucleotide silencing elements targeting RPS10. US Patent Application publication 2014/0275208 and US2015/0257389 describe polynucleotide silencing elements targeting RyanR and PAT3. PCT publications WO 2016/060911, WO 2016/060912, WO 2016/060913, and WO 2016/060914 describe polynucleotide silencing elements targeting COPI coatomer subunit nucleic acid molecules that confer resistance to Coleopteran and Hemipteran pests. US Patent Application Publications 2012/029750, US 20120297501, and 2012/0322660 describe interfering ribonucleic acids (RNA or double stranded RNA) that functions upon uptake by an insect pest species to down-regulate expression of a target gene in said insect pest, wherein the RNA comprises at least one silencing element wherein the silencing element is a region of double-stranded RNA comprising annealed complementary strands, one strand of which comprises or consists of a sequence of nucleotides which is at least partially complementary to a target nucleotide sequence within the target gene. US Patent Application Publication 2012/0164205 describe potential targets for interfering double stranded ribonucleic acids for inhibiting invertebrate pests including: a Chd3 Homologous Sequence, a Beta-Tubulin Homologous Sequence, a 40 kDa V-ATPase Homologous Sequence, a EF1α Homologous Sequence, a 26S Proteosome Subunit p28 Homologous Sequence, a Juvenile Hormone Epoxide Hydrolase Homologous Sequence, a Swelling Dependent Chloride Channel Protein Homologous Sequence, a Glucose-6-Phosphate 1-Dehydrogenase Protein Homologous Sequence, an Act42A Protein Homologous Sequence, a ADP-Ribosylation Factor 1 Homologous Sequence, a Transcription Factor IIB Protein Homologous Sequence, a Chitinase Homologous Sequences, a Ubiquitin Conjugating Enzyme Homologous Sequence, a Glyceraldehyde-3-Phosphate Dehydrogenase Homologous Sequence, an Ubiquitin B Homologous Sequence, a Juvenile Hormone Esterase Homolog, and an Alpha Tubuliln Homologous Sequence.

[0187] ii. Transgenes that Confer Resistance to a Herbicide.

[0188] (A) A polynucleotide encoding resistance to a herbicide that inhibits the growing point or meristem, such as an imidazolinone or a sulfonylurea. Exemplary genes in this category code for mutant ALS and AHAS enzyme as described, for example, by Lee, et al., (1988) EMBO J. 7:1241 and Miki, et al., (1990) Theor. Appl. Genet. 80:449, respectively. See also, U.S. Pat. Nos. 5,605,011; 5,013,659; 5,141,870; 5,767,361; 5,731,180; 5,304,732; 4,761,373; 5,331,107; 5,928,937 and 5,378,824; U.S. patent application Ser. No. 11/683,737 and International Publication WO 1996/33270.

[0189] (B) A polynucleotide encoding a protein for resistance to Glyphosate (resistance imparted by mutant 5-enolpyruvl-3-phosphikimate synthase (EPSP) and aroA genes, respectively) and other phosphono compounds such as glufosinate (phosphinothricin acetyl transferase (PAT) and Streptomyces hygroscopicus phosphinothricin acetyl transferase (bar) genes), and pyridinoxy or phenoxy proprionic acids and cyclohexones (ACCase inhibitor-encoding genes). See, for example, U.S. Pat. No. 4,940,835 to Shah, et al., which discloses the nucleotide sequence of a form of EPSPS which can confer glyphosate resistance. U.S. Pat. No. 5,627,061 to Barry, et al., also describes genes encoding EPSPS enzymes. See also, U.S. Pat. Nos. 6,566,587; 6,338,961; 6,248,876 B1; 6,040,497; 5,804,425; 5,633,435; 5,145,783; 4,971,908; 5,312,910; 5,188,642; 5,094,945, 4,940,835; 5,866,775; 6,225,114 B1; 6,130,366; 5,310,667; 4,535,060; 4,769,061; 5,633,448; 5,510,471; Re. 36,449; RE 37,287 E and 5,491,288 and International Publications EP 1173580; WO 2001/66704; EP 1173581 and EP 1173582.

[0190] Glyphosate resistance is also imparted to plants that express a gene encoding a glyphosate oxido-reductase enzyme as described more fully in U.S. Pat. Nos. 5,776,760 and 5,463,175. In addition glyphosate resistance can be imparted to plants by the over expression of genes encoding glyphosate N-acetyltransferase. See, for example, U.S. Pat. Nos. 7,462,481; 7,405,074 and US Patent Application Publication Number US 2008/0234130. A DNA molecule encoding a mutant aroA gene can be obtained under ATCC Accession Number 39256, and the nucleotide sequence of the mutant gene is disclosed in U.S. Pat. No. 4,769,061 to Comai. EP Application Number 0 333 033 to Kumada, et al., and U.S. Pat. No. 4,975,374 to Goodman, et al., disclose nucleotide sequences of glutamine synthetase genes which confer resistance to herbicides such as L-phosphinothricin. The nucleotide sequence of a phosphinothricin-acetyl-transferase gene is provided in EP Application Numbers 0 242 246 and 0 242 236 to Leemans, et al.; De Greef, et al., (1989) Bio/Technology 7:61, describe the production of transgenic plants that express chimeric bar genes coding for phosphinothricin acetyl transferase activity. See also, U.S. Pat. Nos. 5,969,213; 5,489,520; 5,550,318; 5,874,265; 5,919,675; 5,561,236; 5,648,477; 5,646,024; 6,177,616 B1 and 5,879,903. Exemplary genes conferring resistance to phenoxy proprionic acids and cyclohexones, such as sethoxydim and haloxyfop, are the Acc1-S1, Acc1-S2 and Acc1-S3 genes described by Marshall, et al., (1992) Theor. Appl. Genet. 83:435.

[0191] (C) A polynucleotide encoding a protein for resistance to herbicide that inhibits photosynthesis, such as a triazine (psbA and gs+ genes) and a benzonitrile (nitrilase gene). Przibilla, et al., (1991) Plant Cell 3:169, describe the transformation of Chlamydomonas with plasmids encoding mutant psbA genes. Nucleotide sequences for nitrilase genes are disclosed in U.S. Pat. No. 4,810,648 to Stalker and DNA molecules containing these genes are available under ATCC Accession Numbers 53435, 67441 and 67442. Cloning and expression of DNA coding for a glutathione S-transferase is described by Hayes, et al., (1992) Biochem. J. 285:173.

[0192] (D) A polynucleotide encoding a protein for resistance to Acetohydroxy acid synthase, which has been found to make plants that express this enzyme resistant to multiple types of herbicides, has been introduced into a variety of plants (see, e.g., Hattori, et al., (1995) Mol Gen Genet. 246:419). Other genes that confer resistance to herbicides include: a gene encoding a chimeric protein of rat cytochrome P4507A1 and yeast NADPH-cytochrome P450 oxidoreductase (Shiota, et al., (1994) Plant Physiol 106:17), genes for glutathione reductase and superoxide dismutase (Aono, et al., (1995) Plant Cell Physiol 36:1687) and genes for various phosphotransferases (Datta, et al., (1992) Plant Mol Biol 20:619).

[0193] (E) A polynucleotide encoding resistance to a herbicide targeting Protoporphyrinogen oxidase (protox) which is necessary for the production of chlorophyll. The protox enzyme serves as the target for a variety of herbicidal compounds. These herbicides also inhibit growth of all the different species of plants present, causing their total destruction. The development of plants containing altered protox activity which are resistant to these herbicides are described in U.S. Pat. Nos. 6,288,306 B1; 6,282,837 B1 and 5,767,373 and International Publication WO 2001/12825.

[0194] (F) The aad-1 gene (originally from Sphingobium herbicidovorans) encodes the aryloxyalkanoate dioxygenase (AAD-1) protein. The trait confers tolerance to 2,4-dichlorophenoxyacetic acid and aryloxyphenoxypropionate (commonly referred to as “fop” herbicides such as quizalofop) herbicides. The aad-1 gene, itself, for herbicide tolerance in plants was first disclosed in WO 2005/107437 (see also, US 2009/0093366). The aad-12 gene, derived from Delftia acidovorans, which encodes the aryloxyalkanoate dioxygenase (AAD-12) protein that confers tolerance to 2,4-dichlorophenoxyacetic acid and pyridyloxyacetate herbicides by deactivating several herbicides with an aryloxyalkanoate moiety, including phenoxy auxin (e.g., 2,4-D, MCPA), as well as pyridyloxy auxins (e.g., fluoroxypyr, triclopyr).

[0195] (G) A polynucleotide encoding a herbicide resistant dicamba monooxygenase disclosed in US Patent Application Publication 2003/0135879 for imparting dicamba tolerance.

[0196] (H) A polynucleotide molecule encoding bromoxynil nitrilase (Bxn) disclosed in U.S. Pat. No. 4,810,648 for imparting bromoxynil tolerance.

[0197] (I) A polynucleotide molecule encoding phytoene (crtl) described in Misawa, et al., (1993) Plant J. 4:833-840 and in Misawa, et al., (1994) Plant J. 6:481-489 for norflurazon tolerance.

[0198] iii. Transgenes that Confer or Contribute to an Altered Grain Characteristic

[0199] (A) Altered fatty acids, for example, by (1) Down-regulation of stearoyl-ACP to increase stearic acid content of the plant. See, Knultzon, et al., (1992) Proc. Natl. Acad. Sci. USA 89:2624 and WO 1999/64579 (Genes to Alter Lipid Profiles in Corn); (2) Elevating oleic acid via FAD-2 gene modification and/or decreasing linolenic acid via FAD-3 gene modification (see, U.S. Pat. Nos. 6,063,947; 6,323,392; 6,372,965 and WO 1993/11245); (3) Altering conjugated linolenic or linoleic acid content, such as in WO 2001/12800; (4) Altering LEC1, AGP, Dek1, Superal1, mil ps, various Ipa genes such as Ipa1, Ipa3, hpt or hggt. For example, see, WO 2002/42424, WO 1998/22604, WO 2003/011015, WO 2002/057439, WO 2003/011015, U.S. Pat. Nos. 6,423,886, 6,197,561, 6,825,397 and US Patent Application Publication Numbers US 2003/0079247, US 2003/0204870 and Rivera-Madrid, et al., (1995) Proc. Natl. Acad. Sci. 92:5620-5624; (5) Genes encoding delta-8 desaturase for making long-chain polyunsaturated fatty acids (U.S. Pat. Nos. 8,058,571 and 8,338,152), delta-9 desaturase for lowering saturated fats (U.S. Pat. No. 8,063,269), Primula delta 6-desaturase for improving omega-3 fatty acid profiles; (6) Isolated nucleic acids and proteins associated with lipid and sugar metabolism regulation, in particular, lipid metabolism protein (LMP) used in methods of producing transgenic plants and modulating levels of seed storage compounds including lipids, fatty acids, starches or seed storage proteins and use in methods of modulating the seed size, seed number, seed weights, root length and leaf size of plants (EP 2404499); (7) Altering expression of a High-Level Expression of Sugar-Inducible 2 (HSI2) protein in the plant to increase or decrease expression of HSI2 in the plant. Increasing expression of HSI2 increases oil content while decreasing expression of HSI2 decreases abscisic acid sensitivity and/or increases drought resistance (US Patent Application Publication Number 2012/0066794); (8) Expression of cytochrome b5 (Cb5) alone or with FAD2 to modulate oil content in plant seed, particularly to increase the levels of omega-3 fatty acids and improve the ratio of omega-6 to omega-3 fatty acids (US Patent Application Publication Number 2011/0191904); and (9) Nucleic acid molecules encoding wrinkled1-like polypeptides for modulating sugar metabolism (U.S. Pat. No. 8,217,223).

[0200] (B) Altered phosphorus content, for example, by the (1) introduction of a phytase-encoding gene would enhance breakdown of phytate, adding more free phosphate to the transformed plant. For example, see, Van Hartingsveldt, et al., (1993) Gene 127:87, for a disclosure of the nucleotide sequence of an Aspergillus niger phytase gene; and (2) modulating a gene that reduces phytate content. In maize, this, for example, could be accomplished, by cloning and then re-introducing DNA associated with one or more of the alleles, such as the LPA alleles, identified in maize mutants characterized by low levels of phytic acid, such as in WO 2005/113778 and/or by altering inositol kinase activity as in WO 2002/059324, US Patent Application Publication Number 2003/0009011, WO 2003/027243, US Patent Application Publication Number 2003/0079247, WO 1999/05298, U.S. Pat. Nos. 6,197,561, 6,291,224, 6,391,348, WO 2002/059324, US Patent Application Publication Number 2003/0079247, WO 1998/45448, WO 1999/55882, WO 2001/04147.

[0201] (C) Altered carbohydrates affected, for example, by altering a gene for an enzyme that affects the branching pattern of starch or, a gene altering thioredoxin such as NTR and/or TRX (see, U.S. Pat. No. 6,531,648. which is incorporated by reference for this purpose) and/or a gamma zein knock out or mutant such as cs27 or TUSC27 or en27 (see, U.S. Pat. No. 6,858,778 and US Patent Application Publication Number 2005/0160488, US Patent Application Publication Number 2005/0204418, which are incorporated by reference for this purpose). See, Shiroza, et al., (1988) J. Bacteriol. 170:810 (nucleotide sequence of Streptococcus mutant fructosyltransferase gene), Steinmetz, et al., (1985) Mol. Gen. Genet. 200:220 (nucleotide sequence of Bacillus subtilis levansucrase gene), Pen, et al., (1992) Bio/Technology 10:292 (production of transgenic plants that express Bacillus licheniformis alpha-amylase), Elliot, et al., (1993) Plant Molec. Biol. 21:515 (nucleotide sequences of tomato invertase genes), Sogaard, et al., (1993) J. Biol. Chem. 268:22480 (site-directed mutagenesis of barley alpha-amylase gene) and Fisher, et al., (1993) Plant Physiol. 102:1045 (maize endosperm starch branching enzyme II), WO 1999/10498 (improved digestibility and/or starch extraction through modification of UDP-D-xylose 4-epimerase, Fragile 1 and 2, Ref1, HCHL, C4H), U.S. Pat. No. 6,232,529 (method of producing high oil seed by modification of starch levels (AGP)). The fatty acid modification genes mentioned herein may also be used to affect starch content and/or composition through the interrelationship of the starch and oil pathways.

[0202] (D) Altered antioxidant content or composition, such as alteration of tocopherol or tocotrienols. For example, see, U.S. Pat. No. 6,787,683, US Patent Application Publication Number 2004/0034886 and WO 2000/68393 involving the manipulation of antioxidant levels and WO 2003/082899 through alteration of a homogentisate geranyl geranyl transferase (hggt).

[0203] (E) Altered essential seed amino acids. For example, see, U.S. Pat. No. 6,127,600 (method of increasing accumulation of essential amino acids in seeds), U.S. Pat. No. 6,080,913 (binary methods of increasing accumulation of essential amino acids in seeds), U.S. Pat. No. 5,990,389 (high lysine), WO 1999/40209 (alteration of amino acid compositions in seeds), WO 1999/29882 (methods for altering amino acid content of proteins), U.S. Pat. No. 5,850,016 (alteration of amino acid compositions in seeds), WO 1998/20133 (proteins with enhanced levels of essential amino acids), U.S. Pat. No. 5,885,802 (high methionine), U.S. Pat. No. 5,885,801 (high threonine), U.S. Pat. No. 6,664,445 (plant amino acid biosynthetic enzymes), U.S. Pat. No. 6,459,019 (increased lysine and threonine), U.S. Pat. No. 6,441,274 (plant tryptophan synthase beta subunit), U.S. Pat. No. 6,346,403 (methionine metabolic enzymes), U.S. Pat. No. 5,939,599 (high sulfur), U.S. Pat. No. 5,912,414 (increased methionine), WO 1998/56935 (plant amino acid biosynthetic enzymes), WO 1998/45458 (engineered seed protein having higher percentage of essential amino acids), WO 1998/42831 (increased lysine), U.S. Pat. No. 5,633,436 (increasing sulfur amino acid content), U.S. Pat. No. 5,559,223 (synthetic storage proteins with defined structure containing programmable levels of essential amino acids for improvement of the nutritional value of plants), WO 1996/01905 (increased threonine), WO 1995/15392 (increased lysine), US Patent Application Publication Number 2003/0163838, US Patent Application Publication Number 2003/0150014, US Patent Application Publication Number 2004/0068767, U.S. Pat. No. 6,803,498, WO 2001/79516.

[0204] iv. Genes that Control Male-Sterility

[0205] There are several methods of conferring genetic male sterility available, such as multiple mutant genes at separate locations within the genome that confer male sterility, as disclosed in U.S. Pat. Nos. 4,654,465 and 4,727,219 to Brar, et al., and chromosomal translocations as described by Patterson in U.S. Pat. Nos. 3,861,709 and 3,710,511. In addition to these methods, Albertsen, et al., U.S. Pat. No. 5,432,068, describe a system of nuclear male sterility which includes: identifying a gene which is critical to male fertility; silencing this native gene which is critical to male fertility; removing the native promoter from the essential male fertility gene and replacing it with an inducible promoter; inserting this genetically engineered gene back into the plant; and thus creating a plant that is male sterile because the inducible promoter is not “on” resulting in the male fertility gene not being transcribed. Fertility is restored by inducing or turning “on”, the promoter, which in turn allows the gene that confers male fertility to be transcribed. Non-limiting examples include: (A) Introduction of a deacetylase gene under the control of a tapetum-specific promoter and with the application of the chemical N-Ac-PPT (WO 2001/29237); (B) Introduction of various stamen-specific promoters (WO 1992/13956, WO 1992/13957); and (C) Introduction of the barnase and the barstar gene (Paul, et al., (1992) Plant Mol. Biol. 19:611-622). For additional examples of nuclear male and female sterility systems and genes, see also, U.S. Pat. Nos. 5,859,341; 6,297,426; 5,478,369; 5,824,524; 5,850,014 and 6,265,640.

[0206] v. Genes that Create a Site for Site Specific DNA Integration.

[0207] This includes the introduction of FRT sites that may be used in the FLP/FRT system and/or Lox sites that may be used in the Cre/Loxp system. For example, see, Lyznik, et al., (2003) Plant Cell Rep 21:925-932 and WO 1999/25821. Other systems that may be used include the Gln recombinase of phage Mu (Maeser, et al., (1991) Vicki Chandler, The Maize Handbook ch. 118 (Springer-Verlag 1994), the Pin recombinase of E. coli (Enomoto, et al., 1983) and the R/RS system of the pSRi plasmid (Araki, et al., 1992).

[0208] vi. Genes that Affect Abiotic Stress Resistance

[0209] Including but not limited to flowering, ear and seed development, enhancement of nitrogen utilization efficiency, altered nitrogen responsiveness, drought resistance or tolerance, cold resistance or tolerance and salt resistance or tolerance and increased yield under stress. Non-limiting examples include: (A) For example, see: WO 2000/73475 where water use efficiency is altered through alteration of malate; U.S. Pat. Nos. 5,892,009, 5,965,705, 5,929,305, 5,891,859, 6,417,428, 6,664,446, 6,706,866, 6,717,034, 6,801,104, WO 2000/060089, WO 2001/026459, WO 2001/035725, WO 2001/034726, WO 2001/035727, WO 2001/036444, WO 2001/036597, WO 2001/036598, WO 2002/015675, WO 2002/017430, WO 2002/077185, WO 2002/079403, WO 2003/013227, WO 2003/013228, WO 2003/014327, WO 2004/031349, WO 2004/076638, WO 199809521; (B) WO 199938977 describing genes, including CBF genes and transcription factors effective in mitigating the negative effects of freezing, high salinity and drought on plants, as well as conferring other positive effects on plant phenotype; (C) US Patent Application Publication Number 2004/0148654 and WO 2001/36596 where abscisic acid is altered in plants resulting in improved plant phenotype such as increased yield and/or increased tolerance to abiotic stress; (D) WO 2000/006341, WO 2004/090143, U.S. Pat. Nos. 7,531,723 and 6,992,237 where cytokinin expression is modified resulting in plants with increased stress tolerance, such as drought tolerance, and/or increased yield. Also see, WO 2002/02776, WO 2003/052063, JP 2002/281975, U.S. Pat. No. 6,084,153, WO 2001/64898, U.S. Pat. Nos. 6,177,275 and 6,107,547 (enhancement of nitrogen utilization and altered nitrogen responsiveness); (E) For ethylene alteration, see, US Patent Application Publication Number 2004/0128719, US Patent Application Publication Number 2003/0166197 and WO 2000/32761; (F) For plant transcription factors or transcriptional regulators of abiotic stress, see, e.g., US Patent Application Publication Number 2004/0098764 or US Patent Application Publication Number 2004/0078852; (G) Genes that increase expression of vacuolar pyrophosphatase such as AVP1 (U.S. Pat. No. 8,058,515) for increased yield; nucleic acid encoding a HSFA4 or a HSFA5 (Heat Shock Factor of the class A4 or A5) polypeptides, an oligopeptide transporter protein (OPT4-like) polypeptide; a plastochron2-like (PLA2-like) polypeptide or a Wuschel related homeobox 1-like (WOX1-like) polypeptide (U. Patent Application Publication Number US 2011/0283420); (H) Down regulation of polynucleotides encoding poly (ADP-ribose) polymerase (PARP) proteins to modulate programmed cell death (U.S. Pat. No. 8,058,510) for increased vigor; (I) Polynucleotide encoding DTP21 polypeptides for conferring drought resistance (US Patent Application Publication Number US 2011/0277181); (J) Nucleotide sequences encoding ACC Synthase 3 (ACS3) proteins for modulating development, modulating response to stress, and modulating stress tolerance (US Patent Application Publication Number US 2010/0287669); (K) Polynucleotides that encode proteins that confer a drought tolerance phenotype (DTP) for conferring drought resistance (WO 2012/058528); (L) Tocopherol cyclase (TC) genes for conferring drought and salt tolerance (US Patent Application Publication Number 2012/0272352); (M) CAAX amino terminal family proteins for stress tolerance (U.S. Pat. No. 8,338,661); (N) Mutations in the SAL1 encoding gene have increased stress tolerance, including increased drought resistant (US Patent Application Publication Number 2010/0257633); (0) Expression of a nucleic acid sequence encoding a polypeptide selected from the group consisting of: GRF polypeptide, RAA1-like polypeptide, SYR polypeptide, ARKL polypeptide, and YTP polypeptide increasing yield-related traits (US Patent Application Publication Number 2011/0061133); and (P) Modulating expression in a plant of a nucleic acid encoding a Class III Trehalose Phosphate Phosphatase (TPP) polypeptide for enhancing yield-related traits in plants, particularly increasing seed yield (US Patent Application Publication Number 2010/0024067).

[0210] Other genes and transcription factors that affect plant growth and agronomic traits such as yield, flowering, plant growth and/or plant structure, can be introduced or introgressed into plants, see e.g., WO 1997/49811 (LHY), WO 1998/56918 (ESD4), WO 1997/10339 and U.S. Pat. No. 6,573,430 (TFL), U.S. Pat. No. 6,713,663 (FT), WO 1996/14414 (CON), WO 1996/38560, WO 2001/21822 (VRN1), WO 2000/44918 (VRN2), WO 1999/49064 (GI), WO 2000/46358 (FR1), WO 1997/29123, U.S. Pat. Nos. 6,794,560, 6,307,126 (GAI), WO 1999/09174 (D8 and Rht) and WO 2004/076638 and WO 2004/031349 (transcription factors).

[0211] vii. Genes that Confer Increased Yield

[0212] Non-limiting examples of genes that confer increased yield are: (A) A transgenic crop plant transformed by a 1-AminoCyclopropane-1-Carboxylate Deaminase-like Polypeptide (ACCDP) coding nucleic acid, wherein expression of the nucleic acid sequence in the crop plant results in the plant's increased root growth, and/or increased yield, and/or increased tolerance to environmental stress as compared to a wild type variety of the plant (U.S. Pat. No. 8,097,769); (B) Over-expression of maize zinc finger protein gene (Zm-ZFP1) using a seed preferred promoter has been shown to enhance plant growth, increase kernel number and total kernel weight per plant (US Patent Application Publication Number 2012/0079623); (C) Constitutive over-expression of maize lateral organ boundaries (LOB) domain protein (Zm-LOBDP1) has been shown to increase kernel number and total kernel weight per plant (US Patent Application Publication Number 2012/0079622); (D) Enhancing yield-related traits in plants by modulating expression in a plant of a nucleic acid encoding a VIM1 (Variant in Methylation 1)-like polypeptide or a VTC2-like (GDP-L-galactose phosphorylase) polypeptide or a DUF1685 polypeptide or an ARF6-like (Auxin Responsive Factor) polypeptide (WO 2012/038893); (E) Modulating expression in a plant of a nucleic acid encoding a Ste20-like polypeptide or a homologue thereof gives plants having increased yield relative to control plants (EP 2431472); and (F) Genes encoding nucleoside diphosphatase kinase (NDK) polypeptides and homologs thereof for modifying the plant's root architecture (US Patent Application Publication Number 2009/0064373).

### IX. Methods of Use

[0213] Methods disclosed herein comprise methods for controlling a plant insect pest, such as a Coleopteran, Hemiptera, or Lepidopteran plant pest, including a Diabrotica, Leptinotarsa, Phyllotreta, Acyrthosiphan, Bemisia, Halyomorpha, Nezara, or Spodoptera plant pest. In one embodiment, the method comprises feeding or applying to a plant insect pest a composition comprising one or more silencing elements disclosed herein, wherein said silencing element, when ingested or contacted by a plant insect pest (i.e., but not limited to, a Coleopteran plant pest including a Diabrotica plant pest, such as, D. virgifera virgifera, D. barberi, D. virgifera zeae, D. speciosa, or D. undecimpunctata howardi), reduces the level of a target polynucleotide of the pest and thereby controls the pest. The pest can be fed the silencing element in a variety of ways. The one or more silencing elements may be fed to male, female, or both sexes of a pest. For example, in an embodiment, a polynucleotide encoding a silencing element, i.e., a silencing element targeting one or more polynucleotides as set forth in SEQ ID NOS.: 1-53 or 107-407, is introduced into a plant. As the plant pest feeds on the plant or part thereof expressing these sequences, the silencing element is delivered to the pest at larval, adult, or at any or all developmental stages. In one embodiment, the methods and compositions described herein further comprise a transgenic plant comprising one or more silencing elements disclosed herein, wherein the one or more silencing elements has sterilization activity at larval, adult or at any or all developmental stages. When the one or more silencing elements are delivered to the plant in this manner, it is recognized that the silencing elements can be expressed constitutively or alternatively, it may be produced in a stage-specific manner by employing the various inducible or tissue-preferred or developmentally regulated promoters that are discussed elsewhere herein. In certain embodiments, the one or more silencing elements are expressed in the roots, stalk or stem, leaf including pedicel, xylem and phloem, fruit or reproductive tissue, silk, flowers and all parts therein or any combination thereof. Sterile insects may result from exposure to one or more silencing elements in this manner and hence sterilize insects of opposite the sex through competitive mating or SIT.

[0214] In another method, a composition comprising one or more silencing elements disclosed herein is applied to a plant. In such embodiments, the silencing elements may be formulated in an agronomically suitable and/or environmentally acceptable carrier, which is preferably, suitable for dispersal in fields. In some embodiments, silencing elements targeting different insect stages, pathways, and sexes may be combined for sterility and insecticidal activities. In one embodiment, the silencing elements disclosed herein may be mixed with pesticidal chemicals by tank mix. In addition, the carrier may also include compounds that increase the half-life of the composition. In certain embodiments, the composition comprising the one or more silencing elements is formulated in such a manner such that it persists in the environment for a length of time sufficient to allow it to be delivered to a plant insect pest. In such embodiments, the composition can be applied to an area inhabited by a plant insect pest. In one embodiment, the composition is applied externally to a plant (i.e., by spraying a field) to protect the plant from pests. Sterile insects that result from exposure to silencing elements may sterilize insects of opposite sex through competitive mating or SIT.

[0215] Current RNAI-based strategies have targeted genes in Coleopteran plant pests that are larvacidal, impact development of adults or result in an impact to the next generation of offspring. The efficacy of RNAi is such that any one strategy by itself may allow Coleopteran plant pests to escape the impact of any one silencing element (“escapes”) that have the potential to increase resistance allele frequencies to a transgenic insect control protein that is stacked in combination with RNAi. One method to reduce escapes is to select silencing targets that affect each life stage (larvae, adult emergence, fecundity) and combine them in a transgenic plant. This can be accomplished using several approaches including stacking individual hairpin cassettes targeting each life stage, or generating a chimeric hairpin where all target sequences are combined into one hairpin. This strategy may further reduce the likelihood of passing resistance alleles that can be propagated during the next generation. Larvae that are not killed by the larvicidal RNAi traits will further have reduced adult emerence and those adults that do emerge will have reduced fecundity. This should increase the effectiveness of RNAi as a second MOA to insecticidal proteins deployed in transgenic plants.

[0216] In some embodiments, the compositions and methods relate to a DNA construct or nucleic acid molecule encoding a first RNAi trait, wherein the first RNAi trait comprises a double stranded RNA having larvacidal activity on an insect when ingested, and at least a second nucleic acid molecule encoding a second RNAi trait, wherein the second RNAi trait comprises a double stranded RNA that reduces the insect's fecundity when ingested. In one embodiment, the compositions and methods relate to a DNA construct comprising a nucleic acid molecule encoding a first silencing element, wherein the first silencing element has insect larvacidal activity on an insect when ingested, and a nucleic acid molecule encoding at least a second silencing element, wherein the second silencing element reduces the insect's fecundity when ingested. In another embodiment, the compositions and methods relate to a DNA construct comprising a nucleic acid molecule encoding a first silencing element, wherein the first silencing element has larvacidal activity on an insect when ingested, and at least a second nucleic acid molecule encoding a second silencing element, wherein the second silencing element reduces the insect's fecundity when ingested, and wherein either the first silencing element or the second silencing element reduces the insect's adult emergence when ingested. In another embodiment, the compositions and methods relate to a DNA construct comprising a nucleic acid molecule encoding a first silencing element, wherein the first silencing element has larvacidal activity on an insect when ingested, a second nucleic acid molecule encoding a second silencing element, wherein the second silencing element reduces the insect's fecundity when ingested, and at least a third nucleic acid molecule encoding a third silencing element, wherein the third silencing element reduces the insect's adult emergence when ingested.

[0217] In some embodiments, the compositions and methods relate to a breeding stack comprising a first nucleic acid molecule encoding a first silencing element having larvacidal activity on an insect and at least a second nucleic acid molecule encoding a second silencing element that reduces the insect's fecundity when ingested. In a further embodiment, the breeding stack further comprises at least a third nucleic acid molecule encoding a third silencing element that reduces the insect's adult emergence when ingested. In another embodiment, the compositions and methods relate to a breeding stack comprising a first nucleic acid molecule encoding a first silencing element having larvacidal activity on an insect and at least a second nucleic acid molecule encoding a second silencing element that reduces the insect's fecundity when ingested, and wherein either the first or the second silencing element reduces the insect's adult emergence when ingested.

[0218] In some embodiments, the compositions and methods relate to a molecular stack comprising a first nucleic acid molecule encoding a first silencing element having larvacidal activity on an insect and at least a second nucleic acid molecule encoding a second silencing element that reduces the insect's fecundity when ingested. In a further embodiment, the molecular stack further comprises at least a third nucleic acid molecule encoding a third silencing element that reduces the insect's adult emergence when ingested. In another embodiment, the compositions and methods relate to a molecular stack comprising a first nucleic acid molecule encoding a first silencing element having larvacidal activity on an insect and at least a second nucleic acid molecule encoding a second silencing element that reduces the insect's fecundity when ingested, and wherein either the first or the second silencing element reduces the insect's adult emergence when ingested.

[0219] In certain embodiments, the compositions and methods relate to a DNA construct comprising a nucleic acid molecule encoding a chimeric silencing element, wherein the chimeric silencing element targets a first gene and at least a second gene, and wherein the downregulation of the first gene reduces the fecundity of an insect when ingested or contacted by the insect and the downregulation of the second gene causes larvacidal activity in the insect when ingested or contacted by the insect. In a further embodiment, the chimeric silencing element further targets at least a third gene, wherein the downregulation of the third gene reduces the fecundity of the insect when ingested or contacted by the insect. In some embodiments, the first target gene is expressed in either a male or a female specific pattern, and the third target gene is expressed in either a male or female specific pattern but not the same pattern as the first target gene. In some embodiments, the downregulation of a target gene by the chimeric silencing element causes reduced adult emergence in an insect when ingested or contacted by the pest.

[0220] In some embodiments, nonlimiting examples of genes that when downregulated reduce the fecundity of an insect are set forth in SEQ ID NOs.: 1-53 or 107-407. Nonlimiting examples of genes that when downregulated have larvacidal activity on an insect are set forth in SEQ ID NOs.: 254-259. Nonlimiting examples of genes that when downregulated reduce the insect's adult emergence are set forth in SEQ ID NOs.: 38, 200-216, 238-248, 255-258, and 278-407.

[0221] In some embodiments, the compositions and methods relate to a DNA construct, a molecular stack, or a breeding stack comprising a first silencing element targeting a first polynucleotide sequence set forth in any one of SEQ ID NOs: 1-53 or 107-407, wherein the downregulation of the first polynucleotide sequence reduces the fecundity of an insect, and a second silencing element targeting a second polynucleotide sequence set forth in any one of SEQ ID NOs: 254-259, wherein the downregulation of the second polynucleotide sequence causes larvacidal activity in the insect when ingested by or contacted with the insect. In further embodiments, the first or second silencing element may be a chimeric element. In certain embodiments, the first silencing element is a chimeric silencing element and targets a polynucleotide sequence set forth in SEQ ID NOs: 260-277.

[0222] In certain embodiments, the disclosed polynucleotides or constructs can be stacked with any combination of polynucleotide sequences of interest in order to create plants with a desired trait. A trait, as used herein, refers to the phenotype derived from a particular sequence or groups of sequences. For example, the polynucleotides described herein may be stacked with any other polynucleotides encoding polypeptides having pesticidal and/or insecticidal activity, such as other Bacillus thuringiensis toxic proteins (described in U.S. Pat. Nos. 5,366,892; 5,747,450; 5,737,514; 5,723,756; 5,593,881; and Geiser et al. (1986) Gene 48:109), lectins (Van Damme et al. (1994) Plant Mol. Biol. 24:825, pentin (described in U.S. Pat. No. 5,981,722), and the like. The combinations generated may also include multiple copies of any one of the polynucleotides of interest. The polynucleotides described herein can also be stacked with any other gene or combination of genes to produce plants with a variety of desired trait combinations including, but not limited to, traits desirable for animal feed such as high oil genes (e.g., U.S. Pat. No. 6,232,529); balanced amino acids (e.g., hordothionins (U.S. Pat. Nos. 5,990,389; 5,885,801; 5,885,802; and 5,703,409); barley high lysine (Williamson et al. (1987) Eur. J. Biochem. 165:99-106; and WO 98/20122) and high methionine proteins (Pedersen et al. (1986) J. Biol. Chem. 261:6279; Kirihara et al. (1988) Gene 71:359; and Musumura et al. (1989) Plant Mol. Biol. 12:123)); increased digestibility (e.g., modified storage proteins (U.S. application Ser. No. 10/053,410, filed Nov. 7, 2001); and thioredoxins (U.S. application Ser. No. 10/005,429, filed Dec. 3, 2001)).

[0223] Disclosed polynucleotides can also be stacked with traits desirable for disease or herbicide resistance (e.g., fumonisin detoxification genes (U.S. Pat. No. 5,792,931); avirulence and disease resistance genes (Jones et al. (1994) Science 266:789; Martin et al. (1993) Science 262:1432; Mindrinos et al. (1994) Cell 78:1089); acetolactate synthase (ALS) mutants that lead to herbicide resistance such as the S4 and/or Hra mutations; inhibitors of glutamine synthase such as phosphinothricin or basta (e.g., bar gene); and glyphosate resistance (EPSPS gene)); and traits desirable for processing or process products such as high oil (e.g., U.S. Pat. No. 6,232,529); modified oils (e.g., fatty acid desaturase genes (U.S. Pat. No. 5,952,544; WO 94/11516)); modified starches (e.g., ADPG pyrophosphorylases (AGPase), starch synthases (SS), starch branching enzymes (SBE), and starch debranching enzymes (SDBE)); and polymers or bioplastics (e.g., U.S. Pat. No. 5,602,321; beta-ketothiolase, polyhydroxybutyrate synthase, and acetoacetyl-CoA reductase (Schubert et al. (1988) J. Bacteriol. 170:5837-5847) facilitate expression of polyhydroxyalkanoates (PHAs)); the disclosures of which are herein incorporated by reference. One could also combine the polynucleotides with polynucleotides providing agronomic traits such as male sterility (e.g., see U.S. Pat. No. 5,583,210), stalk strength, drought resistance (e.g., U.S. Pat. No. 7,786,353), flowering time, or transformation technology traits such as cell cycle regulation or gene targeting (e.g., WO 99/61619, WO 00/17364, and WO 99/25821).

[0224] These stacked combinations can be created by any method including, but not limited to, cross-breeding plants by any conventional or TopCross methodology, or genetic transformation. If the sequences are stacked by genetically transforming the plants (i.e., molecular stacks), the polynucleotide sequences of interest can be combined at any time and in any order. For example, a transgenic plant comprising one or more desired traits can be used as the target to introduce further traits by subsequent transformation. The traits can be introduced simultaneously in a co-transformation protocol with the polynucleotides of interest provided by any combination of transformation cassettes. For example, if two sequences will be introduced, the two sequences can be contained in separate transformation cassettes (trans) or contained on the same transformation cassette (cis). Expression of the sequences can be driven by the same promoter or by different promoters. In certain cases, it may be desirable to introduce a transformation cassette that will suppress the expression of the polynucleotide of interest. This may be combined with any combination of other suppression cassettes or overexpression cassettes to generate the desired combination of traits in the plant. It is further recognized that polynucleotide sequences can be stacked at a desired genomic location using a site-specific recombination system. See, for example, WO99/25821, WO99/25854, WO99/25840, WO99/25855, and WO99/25853.

### X. Insect Resistance Management Methods

[0225] Methods disclosed herein comprise methods for controlling a plant insect pest, such as a Coleopteran, Hemiptera, or Lepidopteran plant pest, including a Diabrotica, Leptinotarsa, Phyllotreta, Acyrthosiphan, Bemisia, Halyomorpha, Nezara, or Spodoptera plant pest, such as insect resistance management. Insect resistance management (IRM) is the term used to describe practices aimed at reducing the potential for insect pests to become resistant to a pesticide. Maintenance of Bt (or other pesticidal protein, chemical, or biological) IRM is of great importance because of the threat insect resistance poses to the future use of Bt plant-incorporated protectants and Bt technology as a whole. Specific IRM strategies, such as the high dose/structured refuge strategy, delay insect resistance to specific Bt proteins produced in corn, cotton, and potatoes. However, such strategies result in portions of crops being left susceptible to one or more pests in order to ensure that non-resistant insects develop and become available to mate with any resistant pests produced in protected crops. Accordingly, from a farmer/producer's perspective, it is highly desirable to have as small a refuge as possible and yet still manage insect resistance, in order that the greatest yield be obtained while still maintaining the efficacy of the pest control method used, whether Bt, chemical, some other method, or combinations thereof.

[0226] An often used IRM strategy is the planting of a refuge (a portion of the total acreage using non-Bt/pesticidal trait seed), as it is commonly-believed that this will delay the development of insect resistance to pesticidal traits by maintaining insect susceptibility. The theoretical basis of the refuge strategy for delaying resistance hinges on the assumption that the frequency and recessiveness of insect resistance is inversely proportional to pest susceptibility; resistance will be rare and recessive only when pests are very susceptible to the toxin, and conversely resistance will be more frequent and less recessive when pests are not very susceptible. Furthermore, the strategy assumes that resistance to Bt is recessive and is conferred by a single locus with two alleles resulting in three genotypes: susceptible homozygotes (SS), heterozygotes (RS), and resistant homozygotes (RR). It also assumes that there will be a low initial resistance allele frequency and that there will be extensive random mating between resistant and susceptible adults. Under ideal circumstances, only rare RR individuals will survive a pesticidal toxin produced by the crop. Both SS and RS individuals will be susceptible to the pesticidal toxin. A structured refuge is a non-Bt/pesticidal trait portion of a grower's field or set of fields that provides for the production of susceptible (SS) insects that may randomly mate with rare resistant (RR) insects surviving the pesticidal trait crop, which may be a Bt trait crop, to produce susceptible RS heterozygotes that will be killed by the Bt/pesticidal trait crop. An integrated refuge is a certain portion of randomly planted non-Bt/pesticidal trait portion of a grower's field or set of fields that provides for the production of susceptible (SS) insects that may randomly mate with rare resistant (RR) insects surviving the pesticidal trait crop to produce susceptible RS heterozygotes that will be killed by the pesticidal trait crop Each refuge strategy will remove resistant (R) alleles from the insect populations and delay the evolution of resistance.

[0227] Another strategy to reduce the need for refuge is the pyramiding of traits with different modes of action against a target insect pest. For example, Bt toxins that have different modes of action stacked in one transgenic plant are able to have reduced refuge requirements. Different modes of action in a stacked combination also maintains the durability of each trait, as resistance is slower to develop to each trait.

[0228] Currently, the size, placement, and management of the refuge are often considered critical to the success of refuge strategies to mitigate insect resistance to the Bt/pesticidal trait produced in corn, cotton, soybean, and other crops. Because of the decrease in yield in refuge planting areas, some farmers choose to eschew the refuge requirements, and others do not follow the size and/or placement requirements. These issues result in either no refuge or less effective refuge, and a corresponding risk of the increase in the development of resistance pests.

[0229] Accordingly, there remains a need for methods for managing pest resistance in a plot of pest resistant crop plants. It would be useful to provide an improved method for the protection of plants, especially corn or other crop plants, from feeding damage by pests. It would be particularly useful if such a method would reduce the required application rate of conventional chemical pesticides, and also if it would limit the number of separate field operations that were required for crop planting and cultivation. In addition, it would be useful to have a method of deploying a transgenic refuge that eliminates the above-described problems with regard to compliance that dilute or remove the efficacy of many resistance management strategies.

[0230] One embodiment relates to a method of reducing the development of resistant pests comprising providing a plant protection composition to a plant (Bt toxin, transgenic insecticidal protein, other insecticidal proteins, chemical insecticides, insecticidal biological entomopathogens, etc.) and contacting the plant pest with a silencing element, i.e., of one or more silencing elements targeting one or more polynucleotides as set forth in SEQ ID NOS.: 1-53 or 107-407, wherein the silencing element, i.e., of one or more silencing elements targeting one or more polynucleotides as set forth in SEQ ID NOS.: 1-53 or 107-407, produces a decrease in expression of one or more of the sequences in the target pest and controls the pest and pest population by insect sterilization or SIT.

[0231] A further embodiment relates to a method of increasing the durability of plant pest compositions comprising providing a plant protection composition to a plant (Bt toxin, transgenic insecticidal protein, other insecticidal proteins, chemical insecticides, insecticidal biological entomopathogens etc.) and contacting a plant pest with the sterilization silencing element, i.e., of one or more polynucleotides as set forth in SEQ ID NOS.: 1-53 or 107-407, or complements thereof, an expression construct comprising a sequence as set forth in SEQ ID NOS.: 1-53 or 107-407, or complements thereof, or silencing elements targeting said polynucleotides, produces a decrease in expression of one or more of the sequences in the target pest and controls the pest and pest population by insect sterilization or sterile insect technique. In another embodiment, the refuge planted as a strip, a block, or integrated with the trait seed comprises a plant further comprising a sterilization silencing element (for example, a silencing element targeting one or more polynucleotides as set forth in SEQ ID NOS.: 1-53 or 107-407).

[0232] In a still further embodiment, the refuge required may be reduced or eliminated by the presence of a sterilization silencing element applied to the non-refuge plants. In another embodiment, the refuge or non-refuge may include a silencing element, i.e., of one or more polynucleotides as set forth in SEQ ID NOS.: 1-53 or 107-407, or complements thereof, an expression construct comprising a sequence as set forth in SEQ ID NOS.: 1-53 or 107-407, or complements thereof, or silencing elements targeting said polynucleotides, as a spray, bait, lure, or as a different transgenic plant.

[0233] In a further embodiment, a pest insect is feed a diet comprising one or more polynucleotides as set forth in SEQ ID NOS.: 1-53 or 107-407, or complements thereof, an expression construct comprising a sequence as set forth in SEQ ID NOS.: 1-53 or 107-407, or complements thereof, or silencing elements targeting said polynucleotides, and said insects are released onto plants at 1, 2, 3, 4, 5, 6, 7, 8, 9, or 10 days following feeding. In a still further embodiment, the pest insect is a female pest insect. In a yet further embodiment, the pest insect is a pest insect, and the pest insect is fed during a larval or adult stage. Insect sterilization may result from male or female sterility, mating of sterile insects, reduction of sperm count, egg production or viability.

[0234] In certain embodiments, the compositions and methods disclosed herein, targeting a sterile gene via RNAi technology, and stacking a polynucleotide encoding a silencing element disclosed herein with an insecticidal protein in a transgenic plant may provide effective control of Coleoptera and potentially extend the durability of Coleopteran insecticidal traits. The extended durability may be a consequence of minimizing the transmission of resistance alleles from Coleopteran beetles that were able to complete their developmental life cycle while feeding on transgenic roots expressing a stack of an insecticidal protein(s) and a RNAi sterility trait disclosed herein. In some embodiments, the methods and compositions relate to a stack, chimera, or combination of silencing elements targeting different genes, wherein the downregulation of the different genes result in at least two of reduced fecundity, larvacidal activity, and reduced adult emergence, wherein the silencing elements or any other plant protection composition has extended durability due to reduced transmission of resistance.

[0235] Current IRM strategy requires a high dose of Bt toxins to minimize insect resistance development. Due to phyto-toxicity, it can be difficult to achieve the required high dose. Integrated pest management (IPM) by different means of insect control may be used to delay insect resistance exposed to a sub-optimal dose of protein toxin, such as a Bt toxin. RNAi mediated SIT may be deployed as part of an IPM strategy.

[0236] As used herein, the term “pesticidal” is used to refer to a toxic effect against a pest (e.g., CRW), and includes activity of either, or both, an externally supplied pesticide and/or an agent that is produced by the crop plants. As used herein, the term “different mode of pesticidal action” includes the pesticidal effects of one or more resistance traits, whether introduced into the crop plants by transformation or traditional breeding methods, such as binding of a pesticidal toxin produced by the crop plants to different binding sites (i.e., different toxin receptors and/or different sites on the same toxin receptor) in the gut membranes of corn rootworms or through RNA interference.

### XI. Application Methods

[0237] In one embodiment, one or more polynucleotides as set forth in SEQ ID NOS.: 1-53 or 107-371, or complements thereof, an expression construct comprising a sequence as set forth in SEQ ID NOS.: 1-53 or 107-371, or complements thereof, or silencing elements targeting said polynucleotide sequences, and compositions comprising said sequences can be applied directly to the seed. For example, one or more polynucleotides as set forth in SEQ ID NOS.: 1-53 or 107-371, or complements thereof, an expression construct comprising one or more sequences as set forth in SEQ ID NOS.: 1-53 or 107-371, or complements thereof, or silencing elements targeting said polynucleotide sequences, used in the compositions and methods disclosed herein can be applied without additional components and without having been diluted.

[0238] In one embodiment, sprays, baits, lures, attractants, and seed treatments can comprise one or more polynucleotides as set forth in SEQ ID NOS.: 1-53 or 107-371, or complements thereof, an expression construct comprising one or more sequences as set forth in SEQ ID NOS.: 1-53 or 107-371, or complements thereof, or silencing elements targeting said polynucleotide sequences, and compositions comprising said sequences.

[0239] In another embodiment, one or more polynucleotides as set forth in SEQ ID NOS.: 1-53 or 107-371, or complements thereof, an expression construct comprising one or more sequences as set forth in SEQ ID NOS.: 1-53 or 107-371, or complements thereof, or silencing elements targeting said polynucleotide sequences, and compositions comprising said sequences are applied to the seed in the form of a suitable formulation. Suitable formulations and methods for the treatment of seed are known to the person skilled in the art and are described, for example, in the following documents: U.S. Pat. Nos. 4,272,417 A, 4,245,432 A, 4,808,430 A, 5,876,739 A, US 2003/0176428 A1, WO 2002/080675 A1, WO 2002/028186 A2.

[0240] The one or more polynucleotides as set forth in SEQ ID NOS.: 1-53 or 107-371, or complements thereof, an expression construct comprising one or more sequences as set forth in SEQ ID NOS.: 1-53 or 107-371, or complements thereof, or silencing elements targeting said polynucleotide sequences, and compositions comprising said sequences can be converted into customary seed dressing formulations, such as solutions, emulsions, suspensions, powders, foams, slurries or other coating materials for seed, and also ULV formulations. These formulations are prepared in a known manner by mixing the one or more polynucleotides as set forth in SEQ ID NOS.: 1-53 or 107-371, or complements thereof, an expression construct comprising one or more sequences as set forth in SEQ ID NOS.: 1-53 or 107-371, or complements thereof, or silencing elements targeting said polynucleotide sequences, and compositions comprising said sequences with customary additives, such as, for example, customary extenders and also solvents or diluents, colorants, wetting agents, dispersants, emulsifiers, defoamers, preservatives, secondary thickeners, adhesives, gibberellins and water as well.

[0241] In another embodiment, suitable colorants that may be present in the seed dressing formulations include all colorants customary for such purposes. Use may be made both of pigments, of sparing solubility in water, and of dyes, which are soluble in water. Examples that may be mentioned include the colorants known under the designations Rhodamine B, C.I. Pigment Red 112, and C.I. Solvent Red 1

[0242] In another embodiment, suitable wetting agents that may be present in the seed dressing formulations include all substances that promote wetting and are customary in the formulation of active agrochemical substances. With preference it is possible to use alkylnaphthalene-sulphonates, such as diisopropyl- or diisobutylnaphthalene-sulphonates.

[0243] In still another embodiment, suitable dispersants and/or emulsifiers that may be present in the seed dressing formulations include all nonionic, anionic, and cationic dispersants that are customary in the formulation of active agrochemical substances. In one embodiment, nonionic or anionic dispersants or mixtures of nonionic or anionic dispersants can be used. In one embodiment, nonionic dispersants include but are not limited to ethylene oxide-propylene oxide block polymers, alkylphenol polyglycol ethers, and tristyrylphenol polyglycol ethers, and their phosphated or sulphated derivatives.

[0244] In still another embodiment, defoamers that may be present in the seed dressing formulations to be used according to the invention include all foam-inhibiting compounds that are customary in the formulation of agrochemically active compounds including, but not limited, to silicone defoamers, magnesium stearate, silicone emulsions, long-chain alcohols, fatty acids and their salts and also organofluorine compounds and mixtures thereof.

[0245] In still another embodiment, secondary thickeners that may be present in the seed dressing formulations include all compounds which can be used for such purposes in agrochemical compositions, including but not limited to cellulose derivatives, acrylic acid derivatives, polysaccharides, such as xanthan gum or Veegum, modified clays, phyllosilicates, such as attapulgite and bentonite, and also finely divided silicic acids.

[0246] Suitable adhesives that may be present in the seed dressing formulations to be used according to the invention include all customary binders which can be used in seed dressings. Polyvinylpyrrolidone, polyvinyl acetate, polyvinyl alcohol and tylose may be mentioned as being preferred.

[0247] In another embodiment, one or more polynucleotides as set forth in SEQ ID NOS.: 1-53 or 107-371, or complements thereof, or an expression construct comprising one or more sequences as set forth in SEQ ID NOS.: 1-53 or 107-371, or complements thereof, or silencing elements targeting said polynucleotide sequences, and compositions comprising said sequences is applied to soil in a first application step, applied to seed in a second application, and to applied to the foliar region of a plant in a third application.

[0248] As used herein, applying one or more polynucleotides as set forth in SEQ ID NOS.: 1-53 or 107-371, or a complement thereof, an expression construct comprising one or more sequences as set forth in SEQ ID NOS.: 1-53 or 107-371, or a complement thereof, or silencing elements targeting said polynucleotide sequences, and compositions comprising said sequences to a seed, a plant, or plant part includes contacting the seed, plant, or plant part directly and/or indirectly with the one or more polynucleotides as set forth in SEQ ID NOS.: 1-53 or 107-371, or complements thereof, an expression construct comprising one or more sequences as set forth in SEQ ID NOS.: 1-53 or 107-371, or complements thereof, or silencing elements targeting said polynucleotide sequences, and compositions comprising said sequences. In one embodiment, one or more polynucleotides as set forth in SEQ ID NOS.: 1-53 or 107-371, or complements thereof, an expression construct comprising one or more sequences as set forth in SEQ ID NOS.: 1-53 or 107-371, or complements thereof, or silencing elements targeting said polynucleotide sequences, and compositions comprising said sequences can be directly applied as a spray, a rinse, or a powder, or any combination thereof.

[0249] In another aspect, one or more polynucleotides as set forth in SEQ ID NOS.: 1-53 or 107-371, or complements thereof, an expression construct comprising one or more sequences as set forth in SEQ ID NOS.: 1-53 or 107-371, or complements thereof, or silencing elements targeting said polynucleotide sequences, and compositions comprising said sequences can be applied directly to a plant or plant part as a powder. As used herein, a powder is a dry or nearly dry bulk solid composed of a large number of very fine particles that may flow freely when shaken or tilted. A dry or nearly dry powder composition disclosed herein preferably contains a low percentage of water, such as, for example, in various aspects, less than 5%, less than 2.5%, or less than 1% by weight.

[0250] In a further embodiment, one or more polynucleotides as set forth in SEQ ID NOS.: 1-53 or 107-371, or complements thereof, an expression construct comprising one or more sequences as set forth in SEQ ID NOS.: 1-53 or 107-371, or complements thereof, or silencing elements targeting said polynucleotide sequences, may be introduced in a bacteria, a yeast, or fungus by transformation techniques known to the skilled artisan, and said transformed bacteria, yeast, or fungus applied to a plant, soil that the plant is growing in, to a hydroponic medium, seed, or any applied per any of the foregoing application methods as described herein above.

[0251] In one embodiment, the one or more polynucleotides as set forth in SEQ ID NOS.: 1-53 or 107-371, or complements thereof, an expression construct comprising one or more sequences as set forth in SEQ ID NOS.: 1-53 or 107-371, or complements thereof, or silencing elements targeting said polynucleotide sequences, and compositions comprising said sequences may be formulated by encapsulation technology to improve stability. In one embodiment the encapsulation technology may comprise a bead polymer for timed release over time. In one embodiment, the encapsulated one or more polynucleotides as set forth in SEQ ID NOS.: 1-53 or 107-371, or complements thereof, an expression construct comprising one or more sequences as set forth in SEQ ID NOS.: 1-53 or 107-371, or complements thereof, or silencing elements targeting said polynucleotide sequences, and compositions comprising said sequences may be applied in a separate application of beads in-furrow to the seeds. In another embodiment, the encapsulated one or more polynucleotides as set forth in SEQ ID NOS.: 1-53 or 107-371, or complements thereof, an expression construct comprising one or more sequences as set forth in SEQ ID NOS.: 1-53 or 107-371, or complements thereof, or silencing elements targeting said polynucleotide sequences, and compositions comprising said sequences may be co-applied along with seeds simultaneously.

[0252] The coating agent usable for the sustained release microparticles of an encapsulation embodiment may be a substance which is useful for coating the microgranular form with the substance to be supported thereon. Any coating agent which can form a coating difficulty permeable for the supported substance may be used in general, without any particular limitation. For example, higher saturated fatty acid, wax, thermoplastic resin, thermosetting resin and the like may be used.

[0253] Examples of useful higher saturated fatty acid include stearic acid, zinc stearate, stearic acid amide and ethylenebis-stearic acid amide; those of wax include synthetic waxes such as polyethylene wax, carbon wax, Hoechst wax, and fatty acid ester; natural waxes such as carnauba wax, bees wax and Japan wax; and petroleum waxes such as paraffin wax and petrolatum. Examples of thermoplastic resin include polyolefins such as polyethylene, polypropylene, polybutene and polystyrene; vinyl polymers such as polyvinyl acetate, polyvinyl chloride, polyvinylidene chloride, polyacrylic acid, polymethacrylic acid, polyacrylate and polymethacrylate; diene polymers such as butadiene polymer, isoprene polymer, chloroprene polymer, butadiene-styrene copolymer, ethylene-propylene-diene copolymer, styrene-isoprene copolymer, MMA-butadiene copolymer and acrylonitrile-butadiene copolymer; polyolefin copolymers such as ethylene-propylene copolymer, butene-ethylene copolymer, butene-propylene copolymer, ethylene-vinyl acetate copolymer, ethylene-acrylic acid copolymer, styreneacrylic acid copolymer, ethylene-methacrylic acid copolymer, ethylene-methacrylic ester copolymer, ethylene-carbon monoxide copolymer, ethylene-vinyl acetate-carbon monoxide copolymer, ethylene-vinyl acetate-vinyl chloride copolymer and ethylene-vinyl acetate-acrylic copolymer; and vinyl chloride copolymers such as vinyl chloride-vinyl acetate copolymer and vinylidene chloride-vinyl chloride copolymer. Examples of thermosetting resin include polyurethane resin, epoxy resin, alkyd resin, unsaturated polyester resin, phenolic resin, urea-melamine resin, urea resin and silicone resin. Of those, thermoplastic acrylic ester resin, butadienestyrene copolymer resin, thermosetting polyurethane resin and epoxy resin are preferred, and among the preferred resins, particularly thermosetting polyurethane resin is preferred. These coating agents can be used either singly or in combination of two or more kinds.

[0254] In one embodiment, one or more polynucleotides as set forth in SEQ ID NOS.: 1-53 or 107-371, or complements thereof, an expression construct comprising one or more sequences as set forth in SEQ ID NOS.: 1-53 or 107-371, or complements thereof, or silencing elements targeting said polynucleotide sequences, and compositions comprising said sequences can be formulated to further comprise an entomopathogen. The methods and compositions of the disclosure, in one embodiment relate to a composition comprising one or more one or more polynucleotides as set forth in SEQ ID NOS.: 1-53 or 107-371, or complements thereof, an expression construct comprising one or more sequences as set forth in SEQ ID NOS.: 1-53 or 107-371, or complements thereof, or silencing elements targeting said polynucleotide sequences, and compositions comprising said sequences and one or more biocontrol agents. As used herein, the term “biocontrol agent” (“BCA”) includes one or more bacteria, fungi or yeasts, protozoas, viruses, entomopathogenic nematodes, and botanical extracts, or products produced by microorganisms including proteins or secondary metabolite, and innoculants that have one or both of the following characteristics: (1) inhibits or reduces plant infestation and/or growth of pathogens, pests, or insects, including but not limited to pathogenic fungi, bacteria, and nematodes, as well as arthropod pests such as insects, arachnids, chilopods, diplopods, or that inhibits plant infestation and/or growth of a combination of plant pathogens, pests, or insects; (2) improves plant performance; (3) improves plant yield; (4) improves plant vigor; and (5) improves plant health. In certain embodiments, the compositions and methods disclosed herein further comprise a biocontrol agent. In some embodiments, the biocontrol agent comprises a fungal entomopathogen. In another embodiment, the fungal entomopathogen is a Metarhizium strain. In some embodiments, the biocontrol agent comprises a Metarhizium anisopliae 15013-1, Metarhizium robertsii 23013-3, Metarhizium anisopliae 3213-1 as set forth in PCT/2016/055952.

### XII. Knockout of Target Genes Using Cas/CRISPR

[0255] In one embodiment, one or more polynucleotides as set forth in SEQ ID NOS.: 1-53 or 107-371, or complements thereof, an expression construct comprising one or more sequences as set forth in SEQ ID NOS.: 1-53 or 107-371, or complements thereof, or silencing elements targeting said polynucleotides, and compositions comprising said sequences, can be can be introduced into the genome of a plant using genome editing technologies, or previously introduced polynucleotides encoding a silencing element disclosed herein in the genome of a plant may be edited using genome editing technologies. For example, the disclosed polynucleotides can be introduced into a desired location in the genome of a plant through the use of double-stranded break technologies such as TALENs, meganucleases, zinc finger nucleases, CRISPR-Cas, and the like. For example, the disclosed polynucleotides can be introduced into a desired location in a genome using a CRISPR-Cas system, for the purpose of site-specific insertion. The desired location in a plant genome can be any desired target site for insertion, such as a genomic region amenable for breeding or may be a target site located in a genomic window with an existing trait of interest. Existing traits of interest could be either an endogenous trait or a previously introduced trait.

[0256] In another aspect, where the disclosed polynucleotide encoding a silencing element has previously been introduced into a genome, genome editing technologies may be used to alter or modify the introduced polynucleotide sequence. Site specific modifications that can be introduced into the disclosed polynucleotide encoding a silencing element compositions include those produced using any method for introducing site specific modification, including, but not limited to, through the use of gene repair oligonucleotides (e.g. US Publication 2013/0019349), or through the use of double-stranded break technologies such as TALENs, meganucleases, zinc finger nucleases, CRISPR-Cas, and the like. Such technologies can be used to modify the previously introduced polynucleotide through the insertion, deletion or substitution of nucleotides within the introduced polynucleotide. Alternatively, double-stranded break technologies can be used to add additional nucleotide sequences to the introduced polynucleotide. Additional sequences that may be added include, additional expression elements, such as enhancer and promoter sequences. In another embodiment, genome editing technologies may be used to position additional insecticidally-active proteins in close proximity to the disclosed polynucleotide compositions disclosed herein within the genome of a plant, in order to generate molecular stacks of insecticidally-active proteins. An “altered target site,” “altered target sequence.” “modified target site,” and “modified target sequence” are used interchangeably herein and refer to a target sequence as disclosed herein that comprises at least one alteration when compared to non-altered target sequence. Such “alterations” include, for example: (i) replacement of at least one nucleotide, (ii) a deletion of at least one nucleotide, (iii) an insertion of at least one nucleotide, or (iv) any combination of (i)-(iii).

[0257] In one embodiment, the methods comprise creating an insect, or colony thereof, wherein the target gene is edited so that it is no longer function, thereby creating a sterile insect. The polynucleotide sequence of the target gene can be used to knockout the target gene polynucleotide in an insect by means known to those skilled in the art, including, but not limited to TALENs, meganucleases, zinc finger nucleases, CRISPR-Cas, and the like. See Ma et al (2014), Scientific Reports, 4: 4489; Daimon et al (2013), Development, Growth, and Differentiation, 56(1): 14-25; and Eggleston et al (2001) BMC Genetics, 2:11. One embodiment comprises an insect with an edited polynucleotide of one or more polynucleotides as set forth in SEQ ID NOS.: 1-53 or 107-371 wherein the edit produces a decrease in expression of or a nonfunctional polypeptide and controls the pest and pest population by insect sterilization and sterile insect technique.

[0258] All publications and patent applications mentioned in the specification are indicative of the level of those skilled in the art to which this invention pertains. All publications and patent applications are herein incorporated by reference to the same extent as if each individual publication or patent application was specifically and individually indicated to be incorporated by reference.

[0259] Although the foregoing embodiments have been described in some detail by way of illustration and example for purposes of clarity of understanding, certain changes and modifications may be practiced within the scope of the appended claims.

[0260] The following examples are offered by way of illustration and not by way of limitation.

### EXPERIMENTAL

### Example 1: Nucleic Acid Sequences

[0261] Nucleic acid sequences disclosed herein comprise the following nucleic acid sequences. Certain sequences are exemplary and were shown to have insect sterilization activity against corn rootworms using the assay methods described in Examples 2, 3, 6, and 17 as set forth below. Such sequences or their complements can be used in the methods as described herein above and below. Methods for making inhibitory sequences are known in the art. DNA constructs, vectors, transgenic cells, plants, seeds or products described herein may comprise one or more of the following nucleic acid or amino acid sequences, or a portion of one or more of the disclosed sequences. Non-limiting examples of target polynucleotides are set forth below in Table 1, or variants and fragments thereof, and complements thereof, including, for example, the transcript, open reading frame (ORF), or IVT fragment cDNA sequences as set forth in SEQ ID NOS.: 1-53 or 107-407, and variants and fragments thereof, and complements thereof. The list of sequences referred to herein include SEQ ID NOS.: 1-53 and 107-407.

TABLE 1
Target Polynucleotides and Target Fragments.

| SEQ | | | |
|---|---|---|---|
| ID | | Common | Fragment |
| NO. | Species | name | ID |
| 1 | Diabrotica | Western Corn | VGR |
| | virgifera virgifera | Rootworm | Transcript |
| 2 | Diabrotica | Western Corn | VGR ORF |
| | virgifera virgifera | Rootworm | |
| 3 | Diabrotica | Western Corn | DV-VGR- |
| | virgifera virgifera | Rootworm | Frag1 |
| 4 | Diabrotica | Western Corn | DV-VGR- |
| | virgifera virgifera | Rootworm | Frag2 |
| 5 | Diabrotica | Western Corn | DV-VGR- |
| | virgifera virgifera | Rootworm | Frag3 |
| 6 | Diabrotica | Western Corn | DV-VGR- |
| | virgifera virgifera | Rootworm | Frag4 |
| 7 | Diabrotica | Western Corn | DV-VGR- |
| | virgifera virgifera | Rootworm | Frag5 |
| 8 | Diabrotica | Western Corn | DV-VGR- |
| | virgifera virgifera | Rootworm | Frag6 |
| 9 | Diabrotica | Western Corn | DV-VGR- |
| | virgifera virgifera | Rootworm | Frag7 |
| 10 | Diabrotica | Western Corn | DV-VGR- |
| | virgifera virgifera | Rootworm | Frag8 |
| 11 | Diabrotica | Western Corn | DV-VGR- |
| | virgifera virgifera | Rootworm | Frag9 |
| 12 | Diabrotica | Western Corn | DV-VGR- |
| | virgifera virgifera | Rootworm | Frag10 |
| 13 | Diabrotica | Western Corn | DV-VGR- |
| | virgifera virgifera | Rootworm | Frag11 |
| 14 | Diabrotica | Western Corn | DV-VGR- |
| | virgifera virgifera | Rootworm | Frag12 |
| 15 | Diabrotica | Western Corn | DV-VGR- |
| | virgifera virgifera | Rootworm | Frag13 |
| 16 | Diabrotica | Western Corn | DV-VGR- |
| | virgifera virgifera | Rootworm | Frag14 |
| 17 | Diabrotica | Western Corn | DV-VGR- |
| | virgifera virgifera | Rootworm | Frag15 |
| 18 | Diabrotica | Western Corn | DV-VGR- |
| | virgifera virgifera | Rootworm | Frag16 |
| 19 | Diabrotica | Southern Corn | VGR ORF |
| | undecimpunctata | Rootworm | |
| 20 | Diabrotica | Southern Corn | VGR |
| | undecimpunctata | Rootworm | Transcript |
| 21 | Leptinotarsa | Colorado | VGR ORF |
| | decemlineata | Potato Beetle | |
| 22 | Leptinotarsa | Colorado | VGR |
| | decemlineata | Potato Beetle | Transcript |
| 23 | Phyllotreta | Striped Flea | VGR ORF |
| | striolata | Beetle | |
| 24 | Phyllotreta | Striped Flea | VGR |
| | striolata | Beetle | Transcript |
| 25 | Halyomorpha | Brown | VGR ORF |
| | halys | Marmorated | |
| | | Stink Bug | |
| 26 | Halyomorpha | Brown | VGR |
| | halys | Marmorated | Transcript |
| | | Stink Bug | |
| 27 | Acyrthosiphon | Pea Aphid | VGR ORF |
| | pisum | | |
| 28 | Acyrthosiphon | Pea Aphid | VGR |
| | pisum | | Transcript |
| 29 | Bemisia tabaci | Silverleaf | VGR ORF |
| | | Whitefly | |
| 30 | Bemisia tabaci | Silverleaf | VGR |
| | | Whitefly | Transcript |
| 31 | Spodoptera litura | Cotton | VGR ORF |
| | | Leafworm | |
| 32 | Spodoptera litura | Cotton | VGR |
| | | Leafworm | Transcript |
| 33 | Phyllotreta | Crucifer Flea | VGR ORF |
| | cruciferae | Beetle | |
| 34 | Phyllotreta | Crucifer Flea | VGR |
| | cruciferae | Beetle | Transcript |
| 35 | Nezara viridula | Southern Green | VGR ORF |
| | | Stink Bug | |
| 36 | Diabrotica | Western Corn | DV-CUL3 |
| | virgifera virgifera | Rootworm | |
| 37 | Diabrotica | Western Corn | DV-NCLB |
| | virgifera virgifera | Rootworm | |
| 38 | Diabrotica | Western Corn | DV-MAEL |
| | virgifera virgifera | Rootworm | |
| 39 | Diabrotica | Western Corn | DV-GUDU |
| | virgifera virgifera | Rootworm | |
| 40 | Diabrotica | Western Corn | DV-GSKT |
| | virgifera virgifera | Rootworm | |
| 41 | Diabrotica | Western Corn | DV-WTS |
| | virgifera virgifera | Rootworm | |
| 42 | Diabrotica | Western Corn | DV-CASP |
| | virgifera virgifera | Rootworm | |
| 43 | Diabrotica | Western Corn | DV-CYCA |
| | virgifera virgifera | Rootworm | |
| 44 | Diabrotica | Western Corn | DV-CUL3- |
| | virgifera virgifera | Rootworm | FRAG1 |
| 45 | Diabrotica | Western Corn | DV-NCLB- |
| | virgifera virgifera | Rootworm | FRAG1 |
| 46 | Diabrotica | Western Corn | DV-MAEL- |
| | virgifera virgifera | Rootworm | FRAG1 |
| 47 | Diabrotica | Western Corn | DV-GUDU- |
| | virgifera virgifera | Rootworm | FRAG1 |
| 48 | Diabrotica | Western Corn | DV-GSKT- |
| | virgifera virgifera | Rootworm | FRAG1 |
| 49 | Diabrotica | Western Corn | DV-WTS- |
| | virgifera virgifera | Rootworm | FRAG1 |
| 50 | Diabrotica | Western Corn | DV-CASP- |
| | virgifera virgifera | Rootworm | FRAG1 |
| 51 | Diabrotica | Western Corn | DV-CYCA- |
| | virgifera virgifera | Rootworm | FRAG1 |
| 52 | Spodoptera | Fall Armyworm | ORF |
| | frugiperda | | |
| 53 | Spodoptera | Fall Armyworm | Transcript |
| | frugiperda | | |
| 107 | Diabrotica | Western Corn | DV-ADE2 |
| | virgifera virgifera | Rootworm | |
| 108 | Diabrotica | Western Corn | DV-HANG |
| | virgifera virgifera | Rootworm | |
| 109 | Diabrotica | Western Corn | DV-KL3 |
| | virgifera virgifera | Rootworm | |
| 110 | Diabrotica | Western Corn | DV-PORIN |
| | virgifera virgifera | Rootworm | |
| 111 | Diabrotica | Western Corn | DV- |
| | virgifera virgifera | Rootworm | SU(VAR)205 |
| 112 | Diabrotica | Western Corn | DV-PARK |
| | virgifera virgifera | Rootworm | |
| 113 | Diabrotica | Western Corn | DV-POE |
| | virgifera virgifera | Rootworm | |
| 114 | Diabrotica | Western Corn | DV-MBD- |
| | virgifera virgifera | Rootworm | LIKE |
| 115 | Diabrotica | Western Corn | DV- |
| | virgifera virgifera | Rootworm | PGLYM78 |
| 116 | Diabrotica | Western Corn | DV-HIRA |
| | virgifera virgifera | Rootworm | |
| 117 | Diabrotica | Western Corn | DV-PUF |
| | virgifera virgifera | Rootworm | |
| 118 | Diabrotica | Western Corn | DV-TUD |
| | virgifera virgifera | Rootworm | |
| 119 | Diabrotica | Western Corn | DV-FAF |
| | virgifera virgifera | Rootworm | |
| 120 | Diabrotica | Western Corn | DV-NUP44A |
| | virgifera virgifera | Rootworm | |
| 121 | Diabrotica | Western Corn | DV-GEK |
| | virgifera virgifera | Rootworm | |
| 122 | Diabrotica | Western Corn | DV-HTS |
| | virgifera virgifera | Rootworm | |
| 123 | Diabrotica | Western Corn | DV-CDK7 |
| | virgifera virgifera | Rootworm | |
| 124 | Diabrotica | Western Corn | DV-DLG1 |
| | virgifera virgifera | Rootworm | |
| 125 | Diabrotica | Western Corn | DV-DM |
| | virgifera virgifera | Rootworm | |
| 126 | Diabrotica | Western Corn | DV-EGG |
| | virgifera virgifera | Rootworm | |
| 127 | Diabrotica | Western Corn | DV-HRG |
| | virgifera virgifera | Rootworm | |
| 128 | Diabrotica | Western Corn | DV-MR |
| | virgifera virgifera | Rootworm | |
| 129 | Diabrotica | Western Corn | DV-CG17083 |
| | virgifera virgifera | Rootworm | |
| 130 | Diabrotica | Western Corn | DV-CG3565 |
| | virgifera virgifera | Rootworm | |
| 131 | Diabrotica | Western Corn | DV-CYCB |
| | virgifera virgifera | Rootworm | |
| 132 | Diabrotica | Western Corn | DV-KNRL |
| | virgifera virgifera | Rootworm | |
| 133 | Diabrotica | Western Corn | DV-MEI |
| | virgifera virgifera | Rootworm | |
| 134 | Diabrotica | Western Corn | DV-TWE |
| | virgifera virgifera | Rootworm | |
| 135 | Diabrotica | Western Corn | DV-BOULE |
| | virgifera virgifera | Rootworm | |
| 136 | Diabrotica | Western Corn | DV-ADE2- |
| | virgifera virgifera | Rootworm | FRAG1 |
| 137 | Diabrotica | Western Corn | DV-HANG- |
| | virgifera virgifera | Rootworm | FRAG1 |
| 138 | Diabrotica | Western Corn | DV-KL3- |
| | virgifera virgifera | Rootworm | FRAG1 |
| 139 | Diabrotica | Western Corn | DV-PORIN- |
| | virgifera virgifera | Rootworm | FRAG1 |
| 140 | Diabrotica | Western Corn | DV- |
| | virgifera virgifera | Rootworm | SU(VAR)205- |
| | | | FRAG1 |
| 141 | Diabrotica | Western Corn | DV-PARK- |
| | virgifera virgifera | Rootworm | FRAG1 |
| 142 | Diabrotica | Western Corn | DV-POE- |
| | virgifera virgifera | Rootworm | FRAG1 |
| 143 | Diabrotica | Western Corn | DV-MBD- |
| | virgifera virgifera | Rootworm | LIKE-FRAG1 |
| 144 | Diabrotica | Western Corn | DV- |
| | virgifera virgifera | Rootworm | PGLYM78- |
| | | | FRAG1 |
| 145 | Diabrotica | Western Corn | DV-HIRA- |
| | virgifera virgifera | Rootworm | FRAG1 |
| 146 | Diabrotica | Western Corn | DV-PUF- |
| | virgifera virgifera | Rootworm | FRAG1 |
| 147 | Diabrotica | Western Corn | DV-TUD- |
| | virgifera virgifera | Rootworm | FRAG1 |
| 148 | Diabrotica | Western Corn | DV-FAF- |
| | virgifera virgifera | Rootworm | FRAG1 |
| 149 | Diabrotica | Western Corn | DV-NUP44A- |
| | virgifera virgifera | Rootworm | FRAG1 |
| 150 | Diabrotica | Western Corn | DV-GEK- |
| | virgifera virgifera | Rootworm | FRAG1 |
| 151 | Diabrotica | Western Corn | DV-HTS- |
| | virgifera virgifera | Rootworm | FRAG1 |
| 152 | Diabrotica | Western Corn | DV-CDK7- |
| | virgifera virgifera | Rootworm | FRAG1 |
| 153 | Diabrotica | Western Corn | DV-DLG1- |
| | virgifera virgifera | Rootworm | FRAG1 |
| 154 | Diabrotica | Western Corn | DV-DM- |
| | virgifera virgifera | Rootworm | FRAG1 |
| 155 | Diabrotica | Western Corn | DV-EGG- |
| | virgifera virgifera | Rootworm | |
| 156 | Diabrotica | Western Corn | DV-HRG- |
| | virgifera virgifera | Rootworm | FRAG1 |
| 157 | Diabrotica | Western Corn | DV-MR- |
| | virgifera virgifera | Rootworm | FRAG1 |
| 158 | Diabrotica | Western Corn | DV- |
| | virgifera virgifera | Rootworm | CG17083- |
| | | | FRAG1 |
| 159 | Diabrotica | Western Corn | DV-CG3565- |
| | virgifera virgifera | Rootworm | FRAG1 |
| 160 | Diabrotica | Western Corn | DV- |
| | virgifera virgifera | Rootworm | DV-CYCB- |
| | | | FRAG1 |
| 161 | Diabrotica | Western Corn | DV-KNRL- |
| | virgifera virgifera | Rootworm | FRAG1 |
| 162 | Diabrotica | Western Corn | DV-MEI- |
| | virgifera virgifera | Rootworm | FRAG1 |
| 163 | Diabrotica | Western Corn | DV-TWE- |
| | virgifera virgifera | Rootworm | FRAG1 |
| 164 | Diabrotica | Western Corn | DV-BOULE- |
| | virgifera virgifera | Rootworm | FRAG1 |
| 165 | Diabrotica | Western Corn | DV-REPH |
| | virgifera virgifera | Rootworm | |
| 166 | Diabrotica | Western Corn | DV-ARMI |
| | virgifera virgifera | Rootworm | |
| 167 | Diabrotica | Western Corn | DV-LOQS |
| | virgifera virgifera | Rootworm | |
| 168 | Diabrotica | Western Corn | DV-SCNY |
| | virgifera virgifera | Rootworm | |
| 169 | Diabrotica | Western Corn | DV-AGO3 |
| | virgifera virgifera | Rootworm | |
| 170 | Diabrotica | Western Corn | DV-DIA |
| | virgifera virgifera | Rootworm | |
| 171 | Diabrotica | Western Corn | DV-DNC |
| | virgifera virgifera | Rootworm | |
| 172 | Diabrotica | Western Corn | DV-CHI |
| | virgifera virgifera | Rootworm | |
| 173 | Diabrotica | Western Corn | DV-SXL |
| | virgifera virgifera | Rootworm | |
| 174 | Diabrotica | Western Corn | DV-SLGA |
| | virgifera virgifera | Rootworm | |
| 175 | Diabrotica | Western Corn | DV-PAPLA1 |
| | virgifera virgifera | Rootworm | |
| 176 | Diabrotica | Western Corn | DV-REPH- |
| | virgifera virgifera | Rootworm | FRAG1 |
| 177 | Diabrotica | Western Corn | DV-ARMI- |
| | virgifera virgifera | Rootworm | FRAG1 |
| 178 | Diabrotica | Western Corn | DV-LOQS- |
| | virgifera virgifera | Rootworm | FRAG1 |
| 179 | Diabrotica | Western Corn | DV-SCNY- |
| | virgifera virgifera | Rootworm | FRAG1 |
| 180 | Diabrotica | Western Corn | DV-AG03- |
| | virgifera virgifera | Rootworm | FRAG1 |
| 181 | Diabrotica | Western Corn | DV-DIA- |
| | virgifera virgifera | Rootworm | FRAG1 |
| 182 | Diabrotica | Western Corn | DV-DNC- |
| | virgifera virgifera | Rootworm | FRAG1 |
| 183 | Diabrotica | Western Corn | DV-CHI- |
| | virgifera virgifera | Rootworm | FRAG1 |
| 184 | Diabrotica | Western Corn | DV-SXL- |
| | virgifera virgifera | Rootworm | FRAG1 |
| 185 | Diabrotica | Western Corn | DV-SLGA- |
| | virgifera virgifera | Rootworm | FRAG1 |
| 186 | Diabrotica | Western Corn | DV-PAPLA1- |
| | virgifera virgifera | Rootworm | FRAG1 |
| 187 | Diabrotica | Southern Corn | DU-BOULE |
| | undecimpunctata | Rootworm | |
| 188 | Leptinotarsa | Colorado | LD-BOULE |
| | decemlineata | Potato Beetle | |
| 189 | Phyllotreta | Crucifer Flea | PC-BOULE |
| | cruciferae | Beetle | |
| 190 | Phyllotreta | Striped Flea | PS-BOULE |
| | striolata | Beetle | |
| 191 | Vibidia | 12-Spotted | VD-BOULE |
| | duodecimguttata | Ladybeetle | |
| 192 | Onus insidiosus | Insidious | OI-BOULE |
| | | Flower Bug | |
| 193 | Lygus hesperus | Western Plant | LH-BOULE |
| | | Bug | |
| 194 | Megacopta | Kudzu Bug | MC-BOULE |
| | cribraria | | |
| 195 | Euschistus servus | Brown Stink | ES-BOULE |
| | | Bug | |
| 196 | Nezara viridula | Southern Green | NV-BOULE |
| | | Stink Bug | |
| 197 | Helicoverpa zea | Corn Earworm | HZ-BOULE |
| 198 | Ostrinia nubilalis | European Corn | ON-BOULE |
| | | Borer | |
| 199 | Spodoptera | Fall Armyworm | SF-BOULE |
| | frugiperda | | |
| 200 | Diabrotica | Southern Corn | DU-MAEL |
| | undecimpunctata | Rootworm | |
| 201 | Leptinotarsa | Colorado | LD-MAEL |
| | decemlineata | Potato Beetle | |
| 202 | Phyllotreta | Striped Flea | PS-MAEL |
| | striolata | Beetle | |
| 203 | Phyllotreta | Crucifer Flea | PC-MAEL |
| | cruciferae | Beetle | |
| 204 | Epilachna | Mexican Bean | EV-MAEL |
| | varivestis | Beetle | |
| 205 | Tribolium | Red Flour | TC-MAEL |
| | castaneum | Beetle | |
| 206 | Vibidia | 12-Spotted | VD-MAEL |
| | duodecimguttata | Ladybeetle | |
| 207 | Helicoverpa zea | Corn Earworm | HZ-MAEL |
| 208 | Megacopta | Kudzu Bug | MC-MAEL |
| | cribraria | | |
| 209 | Nezara viridula | Southern Green | NV-MAEL |
| | | Stink Bug | |
| 210 | Euschistus servus | Brown Stink | ES-MAEL |
| | | Bug | |
| 211 | Onus insidiosus | Insidious | OI-MAEL |
| | | Flower Bug | |
| 212 | Manduca sexta | Hornworm | MS-MAEL |
| 213 | Spodoptera | Fall Armyworm | SF-MAEL |
| | frugiperda | | |
| 214 | Ostrinia nubilalis | European Corn | ON-MAEL |
| | | Borer | |
| 215 | Lygus hesperus | Western Plant | LH-MAEL |
| | | Bug | |
| 216 | Pectinophora | Pink Bollworm | PG-MAEL |
| | gossypiella | | |
| 217 | Diabrotica | Northern Corn | DB-NCLB |
| | barberi | Rootworm | |
| 218 | Diabrotica | Southern Corn | DU-NCLB |
| | undecimpunctata | Rootworm | |
| 219 | Phyllotreta | Striped Flea | PS-NCLB |
| | striolata | Beetle | |
| 220 | Phyllotreta | Crucifer Flea | PC-NCLB |
| | cruciferae | Beetle | |
| 221 | Leptinotarsa | Colorado | LD-NCLB |
| | decemlineata | Potato Beetle | |
| 222 | Tribolium | Red Flour | TC-NCLB |
| | castaneum | Beetle | |
| 223 | Epilachna | Mexican Bean | EV-NCLB |
| | varivestis | Beetle | |
| 224 | Vibidia | 12-Spotted | VD-NCLB |
| | duodecimguttata | Ladybeetle | |
| 225 | Pectinophora | Pink Bollworm | PG-NCLB |
| | gossypiella | | |
| 226 | Spodoptera | Fall Armyworm | SF-NCLB |
| | frugiperda | | |
| 227 | Ostrinia nubilalis | European Corn | ON-NCLB |
| | | Borer | |
| 228 | Manduca sexta | Hornworm | MS-NCLB |
| 229 | Helicoverpa zea | Corn Earworm | HZ-NCLB |
| 230 | Megacopta | Kudzu Bug | MC-NCLB |
| | cribraria | | |
| 231 | Nezara viridula | Southern Green | NV-NCLB |
| | | Stink Bug | |
| 232 | Diabrotica | Western Corn | DV-BOULE- |
| | virgifera virgifera | Rootworm | FRAG2 |
| 233 | Diabrotica | Western Corn | DV-BOULE- |
| | virgifera virgifera | Rootworm | FRAG3 |
| 234 | Diabrotica | Western Corn | DV-BOULE- |
| | virgifera virgifera | Rootworm | FRAG4 |
| 235 | Diabrotica | Western Corn | DV-BOULE- |
| | virgifera virgifera | Rootworm | FRAG5 |
| 236 | Diabrotica | Western Corn | DV-BOULE- |
| | virgifera virgifera | Rootworm | FRAG6 |
| 237 | Diabrotica | Western Corn | DV-BOULE- |
| | virgifera virgifera | Rootworm | FRAG7 |
| 238 | Diabrotica | Western Corn | DV-BOULE- |
| | virgifera virgifera | Rootworm | FRAG8 |
| 239 | Diabrotica | Western Corn | DV-BOULE- |
| | virgifera virgifera | Rootworm | FRAG9 |
| 240 | Diabrotica | Western Corn | DV-MAEL- |
| | virgifera virgifera | Rootworm | FRAG2 |
| 241 | Diabrotica | Western Corn | DV-MAEL- |
| | virgifera virgifera | Rootworm | FRAG3 |
| 242 | Diabrotica | Western Corn | DV-MAEL- |
| | virgifera virgifera | Rootworm | FRAG4 |
| 243 | Diabrotica | Western Corn | DV-MAEL- |
| | virgifera virgifera | Rootworm | FRAG5 |
| 244 | Diabrotica | Western Corn | DV-MAEL- |
| | virgifera virgifera | Rootworm | FRAG6 |
| 245 | Diabrotica | Western Corn | DV-MAEL- |
| | virgifera virgifera | Rootworm | FRAG7 |
| 246 | Diabrotica | Western Corn | DV-MAEL- |
| | virgifera virgifera | Rootworm | FRAG8 |
| 247 | Diabrotica | Western Corn | DV-MAEL- |
| | virgifera virgifera | Rootworm | FRAG9 |
| 248 | Diabrotica | Western Corn | DV-MAEL- |
| | virgifera virgifera | Rootworm | FRAG10 |
| 249 | Diabrotica | Western Corn | DV-NCLB- |
| | virgifera virgifera | Rootworm | FRAG2 |
| 250 | Diabrotica | Western Corn | DV-NCLB- |
| | virgifera virgifera | Rootworm | FRAG3 |
| 251 | Diabrotica | Western Corn | DV-NCLB- |
| | virgifera virgifera | Rootworm | FRAG4 |
| 252 | Diabrotica | Western Corn | DV-NCLB- |
| | virgifera virgifera | Rootworm | FRAG5 |
| 253 | Diabrotica | Western Corn | DV-NCLB- |
| | virgifera virgifera | Rootworm | FRAG6 |
| 254 | Diabrotica | Western Corn | DV-RPS10 |
| | virgifera virgifera | Rootworm | |
| 254 | Diabrotica | Western Corn | DV-RPS10 |
| | virgifera virgifera | Rootworm | |
| 255 | Diabrotica | Western Corn | Ryanr |
| | virgifera virgifera | Rootworm | |
| 256 | Diabrotica | Western Corn | HP2 |
| | virgifera virgifera | Rootworm | |
| 257 | Diabrotica | Western Corn | CoatG |
| | virgifera virgifera | Rootworm | |
| 258 | Diabrotica | Western Corn | CoatA |
| | virgifera virgifera | Rootworm | |
| 259 | Diabrotica | Western Corn | CPC |
| | virgifera virgifera | Rootworm | |
| 260 | Diabrotica | Western Corn | MB1 |
| | virgifera virgifera | Rootworm | |
| 261 | Diabrotica | Western Corn | BM1 |
| | virgifera virgifera | Rootworm | |
| 262 | Diabrotica | Western Corn | MB2 |
| | virgifera virgifera | Rootworm | |
| 263 | Diabrotica | Western Corn | BM2 |
| | virgifera virgifera | Rootworm | |
| 264 | Diabrotica | Western Corn | MB3 |
| | virgifera virgifera | Rootworm | |
| 265 | Diabrotica | Western Corn | BM3 |
| | virgifera virgifera | Rootworm | |
| 266 | Diabrotica | Western Corn | MB4 |
| | virgifera virgifera | Rootworm | |
| 267 | Diabrotica | Western Corn | BM4 |
| | virgifera virgifera | Rootworm | |
| 268 | Diabrotica | Western Corn | MB5 |
| | virgifera virgifera | Rootworm | |
| 269 | Diabrotica | Western Corn | BM5 |
| | virgifera virgifera | Rootworm | |
| 270 | Diabrotica | Western Corn | MB6 |
| | virgifera virgifera | Rootworm | |
| 271 | Diabrotica | Western Corn | BM6 |
| | virgifera virgifera | Rootworm | |
| 272 | Diabrotica | Western Corn | MB7 |
| | virgifera virgifera | Rootworm | |
| 273 | Diabrotica | Western Corn | BM7 |
| | virgifera virgifera | Rootworm | |
| 274 | Diabrotica | Western Corn | MB8 |
| | virgifera virgifera | Rootworm | |
| 275 | Diabrotica | Western Corn | BM8 |
| | virgifera virgifera | Rootworm | |
| 276 | Diabrotica | Western Corn | MB9 |
| | virgifera virgifera | Rootworm | |
| 277 | Diabrotica | Western Corn | BM9 |
| | virgifera virgifera | Rootworm | |
| 278 | Diabrotica | Western Corn | DV-BEL |
| | virgifera virgifera | Rootworm | |
| 279 | Diabrotica | Western Corn | DV-MAGO |
| | virgifera virgifera | Rootworm | |
| 280 | Diabrotica | Western Corn | DV-POLO |
| | virgifera virgifera | Rootworm | |
| 281 | Diabrotica | Western Corn | DV-RPS27A |
| | virgifera virgifera | Rootworm | |
| 282 | Diabrotica | Western Corn | DV-VPS4 |
| | virgifera virgifera | Rootworm | |
| 283 | Diabrotica | Western Corn | DV-CDC42 |
| | virgifera virgifera | Rootworm | |
| 284 | Diabrotica | Western Corn | DV-CHC |
| | virgifera virgifera | Rootworm | |
| 285 | Diabrotica | Western Corn | DV-EIF-2A |
| | virgifera virgifera | Rootworm | |
| 286 | Diabrotica | Western Corn | DV-HSP6OB |
| | virgifera virgifera | Rootworm | |
| 287 | Diabrotica | Western Corn | DV-KHC |
| | virgifera virgifera | Rootworm | |
| 288 | Diabrotica | Western Corn | DV-PAR |
| | virgifera virgifera | Rootworm | |
| 289 | Diabrotica | Western Corn | DV-PCNA |
| | virgifera virgifera | Rootworm | |
| 290 | Diabrotica | Western Corn | DV- |
| | virgifera virgifera | Rootworm | PROSA6T |
| 291 | Diabrotica | Western Corn | DV-SMT3 |
| | virgifera virgifera | Rootworm | |
| 292 | Diabrotica | Western Corn | DV-SNR1 |
| | virgifera virgifera | Rootworm | |
| 293 | Diabrotica | Western Corn | DV-TSR |
| | virgifera virgifera | Rootworm | |
| 294 | Diabrotica | Western Corn | DV-NXT1 |
| | virgifera virgifera | Rootworm | |
| 295 | Diabrotica | Western Corn | DV-CK1A |
| | virgifera virgifera | Rootworm | |
| 296 | Diabrotica | Western Corn | DV-SQH |
| | virgifera virgifera | Rootworm | |
| 297 | Diabrotica | Western Corn | DV-CTBP |
| | virgifera virgifera | Rootworm | |
| 298 | Diabrotica | Western Corn | DV-GAS8 |
| | virgifera virgifera | Rootworm | |
| 299 | Diabrotica | Western Corn | DV-KLP61F |
| | virgifera virgifera | Rootworm | |
| 300 | Diabrotica | Western Corn | DV-DHC64C |
| | virgifera virgifera | Rootworm | |
| 301 | Diabrotica | Western Corn | DV-AOS1 |
| | virgifera virgifera | Rootworm | |
| 302 | Diabrotica | Western Corn | DV-TOP1 |
| | virgifera virgifera | Rootworm | |
| 303 | Diabrotica | Western Corn | DV-APKC |
| | virgifera virgifera | Rootworm | |
| 304 | Diabrotica | Western Corn | DV-CAPT |
| | virgifera virgifera | Rootworm | |
| 305 | Diabrotica | Western Corn | DV-CSN5 |
| | virgifera virgifera | Rootworm | |
| 306 | Diabrotica | Western Corn | DV-FZO |
| | virgifera virgifera | Rootworm | |
| 307 | Diabrotica | Western Corn | DV-A-SPEC |
| | virgifera virgifera | Rootworm | |
| 308 | Diabrotica | Western Corn | DV-B- |
| | virgifera virgifera | Rootworm | TUB60D |
| 309 | Diabrotica | Western Corn | DV-SCRIB |
| | virgifera virgifera | Rootworm | |
| 310 | Diabrotica | Western Corn | DV-B- |
| | virgifera virgifera | Rootworm | TUB56D |
| 311 | Diabrotica | Western Corn | DV-EIF5 |
| | virgifera virgifera | Rootworm | |
| 312 | Diabrotica | Western Corn | DV- |
| | virgifera virgifera | Rootworm | L(3)01239 |
| 313 | Diabrotica | Western Corn | DV-EFF |
| | virgifera virgifera | Rootworm | |
| 314 | Diabrotica | Western Corn | DV-ME31B |
| | virgifera virgifera | Rootworm | |
| 315 | Diabrotica | Western Corn | DV-ZIP |
| | virgifera virgifera | Rootworm | |
| 316 | Diabrotica | Western Corn | DV-PBL |
| | virgifera virgifera | Rootworm | |
| 317 | Diabrotica | Western Corn | DV-R |
| | virgifera virgifera | Rootworm | |
| 318 | Diabrotica | Western Corn | DV- |
| | virgifera virgifera | Rootworm | CG13298 |
| 319 | Diabrotica | Western Corn | DV-TAF1 |
| | virgifera virgifera | Rootworm | |
| 320 | Diabrotica | Western Corn | DV-APC |
| | virgifera virgifera | Rootworm | |
| 321 | Diabrotica | Western Corn | DV-PUF68 |
| | virgifera virgifera | Rootworm | |
| 322 | Diabrotica | Western Corn | DV-RIN |
| | virgifera virgifera | Rootworm | |
| 323 | Diabrotica | Western Corn | DV-CG8116 |
| | virgifera virgifera | Rootworm | |
| 324 | Diabrotica | Western Corn | DV-CHD1 |
| | virgifera virgifera | Rootworm | |
| 325 | Diabrotica | Western Corn | DV-BEL- |
| | virgifera virgifera | Rootworm | FRAG1 |
| 326 | Diabrotica | Western Corn | DV-MAGO- |
| | virgifera virgifera | Rootworm | FRAG1 |
| 327 | Diabrotica | Western Corn | DV-POLO- |
| | virgifera virgifera | Rootworm | FRAG1 |
| 328 | Diabrotica | Western Corn | DV-RPS27A- |
| | virgifera virgifera | Rootworm | FRAG1 |
| 329 | Diabrotica | Western Corn | DV-VPS4- |
| | virgifera virgifera | Rootworm | FRAG1 |
| 330 | Diabrotica | Western Corn | DV-CDC42- |
| | virgifera virgifera | Rootworm | FRAG1 |
| 331 | Diabrotica | Western Corn | DV-CHC- |
| | virgifera virgifera | Rootworm | FRAG1 |
| 332 | Diabrotica | Western Corn | DV-EIF-2A- |
| | virgifera virgifera | Rootworm | FRAG1 |
| 333 | Diabrotica | Western Corn | DV-HSP60B- |
| | virgifera virgifera | Rootworm | FRAG1 |
| 334 | Diabrotica | Western Corn | DV-KHC- |
| | virgifera virgifera | Rootworm | FRAG1 |
| 335 | Diabrotica | Western Corn | DV-PAR- |
| | virgifera virgifera | Rootworm | FRAG1 |
| 336 | Diabrotica | Western Corn | DV-PCNA- |
| | virgifera virgifera | Rootworm | FRAG1 |
| 337 | Diabrotica | Western Corn | PROSA6T- |
| | virgifera virgifera | Rootworm | FRAG1 |
| 338 | Diabrotica | Western Corn | DV-SMT3- |
| | virgifera virgifera | Rootworm | FRAG1 |
| 339 | Diabrotica | Western Corn | DV-SNR1- |
| | virgifera virgifera | Rootworm | FRAG1 |
| 340 | Diabrotica | Western Corn | DV-TSR- |
| | virgifera virgifera | Rootworm | FRAG1 |
| 341 | Diabrotica | Western Corn | DV-NXT1- |
| | virgifera virgifera | Rootworm | FRAG1 |
| 342 | Diabrotica | Western Corn | DV-CK1A- |
| | virgifera virgifera | Rootworm | FRAG1 |
| 343 | Diabrotica | Western Corn | DV-SQH- |
| | virgifera virgifera | Rootworm | FRAG1 |
| 344 | Diabrotica | Western Corn | DV-CTBP- |
| | virgifera virgifera | Rootworm | FRAG1 |
| 345 | Diabrotica | Western Corn | DV-GAS8- |
| | virgifera virgifera | Rootworm | FRAG1 |
| 346 | Diabrotica | Western Corn | DV-KLP61F- |
| | virgifera virgifera | Rootworm | FRAG1 |
| 347 | Diabrotica | Western Corn | DV- |
| | virgifera virgifera | Rootworm | DHC64C- |
| | | | FRAG1 |
| 348 | Diabrotica | Western Corn | DV-AOS1- |
| | virgifera virgifera | Rootworm | FRAG1 |
| 349 | Diabrotica | Western Corn | DV-TOP1- |
| | virgifera virgifera | Rootworm | FRAG1 |
| 350 | Diabrotica | Western Corn | DV-APKC- |
| | virgifera virgifera | Rootworm | FRAG1 |
| 351 | Diabrotica | Western Corn | DV-CAPT- |
| | virgifera virgifera | Rootworm | FRAG1 |
| 352 | Diabrotica | Western Corn | DV-CSN5- |
| | virgifera virgifera | Rootworm | FRAG1 |
| 353 | Diabrotica | Western Corn | DV-FZO- |
| | virgifera virgifera | Rootworm | FRAG1 |
| 354 | Diabrotica | Western Corn | DV-A-SPEC- |
| | virgifera virgifera | Rootworm | FRAG1 |
| 355 | Diabrotica | Western Corn | DV-B- |
| | virgifera virgifera | Rootworm | TUB60D- |
| | | | FRAG1 |
| 356 | Diabrotica | Western Corn | DV-SCRIB- |
| | virgifera virgifera | Rootworm | FRAG1 |
| 357 | Diabrotica | Western Corn | DV-B- |
| | virgifera virgifera | Rootworm | TUB56D- |
| | | | FRAG1 |
| 358 | Diabrotica | Western Corn | DV-EIF5- |
| | virgifera virgifera | Rootworm | FRAG1 |
| 359 | Diabrotica | Western Corn | DV- |
| | virgifera virgifera | Rootworm | L(3)01239- |
| | | | FRAG1 |
| 360 | Diabrotica | Western Corn | DV-EFF- |
| | virgifera virgifera | Rootworm | FRAG1 |
| 361 | Diabrotica | Western Corn | DV-ME31B- |
| | virgifera virgifera | Rootworm | FRAG1 |
| 362 | Diabrotica | Western Corn | DV-ZIP- |
| | virgifera virgifera | Rootworm | FRAG1 |
| 363 | Diabrotica | Western Corn | DV-PBL- |
| | virgifera virgifera | Rootworm | FRAG1 |
| 364 | Diabrotica | Western Corn | DV-R- |
| | virgifera virgifera | Rootworm | FRAG1 |
| 365 | Diabrotica | Western Corn | DV- |
| | virgifera virgifera | Rootworm | CG13298- |
| | | | FRAG1 |
| 366 | Diabrotica | Western Corn | DV-TAF1- |
| | virgifera virgifera | Rootworm | FRAG1 |
| 367 | Diabrotica | Western Corn | DV-APC- |
| | virgifera virgifera | Rootworm | FRAG1 |
| 368 | Diabrotica | Western Corn | DV-PUF68- |
| | virgifera virgifera | Rootworm | FRAG1 |
| 369 | Diabrotica | Western Corn | DV-RIN- |
| | virgifera virgifera | Rootworm | FRAG1 |
| 370 | Diabrotica | Western Corn | DV-CG8116- |
| | virgifera virgifera | Rootworm | FRAG1 |
| 371 | Diabrotica | Western Corn | DV-CHD1- |
| | virgifera virgifera | Rootworm | FRAG1 |
| 372 | Diabrotica | Western Corn | CSP2 |
| | virgifera virgifera | Rootworm | |
| 373 | Diabrotica | Western Corn | EBSP |
| | virgifera virgifera | Rootworm | |
| 374 | Diabrotica | Western Corn | NFFR2 |
| | virgifera virgifera | Rootworm | |
| 375 | Diabrotica | Western Corn | SNFR |
| | virgifera virgifera | Rootworm | |
| 376 | Diabrotica | Western Corn | RFPR |
| | virgifera virgifera | Rootworm | |
| 377 | Diabrotica | Western Corn | DFD |
| | virgifera virgifera | Rootworm | |
| 378 | Diabrotica | Western Corn | ANTP |
| | virgifera virgifera | Rootworm | |
| 379 | Diabrotica | Western Corn | ABD-A |
| | virgifera virgifera | Rootworm | |
| 380 | Diabrotica | Western Corn | ABD-B |
| | virgifera virgifera | Rootworm | |
| 381 | Diabrotica | Western Corn | LAB |
| | virgifera virgifera | Rootworm | |
| 382 | Diabrotica | Western Corn | PB |
| | virgifera virgifera | Rootworm | |
| 383 | Diabrotica | Western Corn | SCR |
| | virgifera virgifera | Rootworm | |
| 384 | Diabrotica | Western Corn | UBX |
| | virgifera virgifera | Rootworm | |
| 385 | Diabrotica | Western Corn | WG |
| | virgifera virgifera | Rootworm | |
| 386 | Diabrotica | Western Corn | CI |
| | virgifera virgifera | Rootworm | |
| 387 | Diabrotica | Western Corn | PTC |
| | virgifera virgifera | Rootworm | |
| 388 | Diabrotica | Western Corn | LGS |
| | virgifera virgifera | Rootworm | |
| 389 | Diabrotica | Western Corn | HH |
| | virgifera virgifera | Rootworm | |
| 390 | Diabrotica | Western Corn | CSP2 Frag1 |
| | virgifera virgifera | Rootworm | |
| 391 | Diabrotica | Western Corn | EBSP Frag1 |
| | virgifera virgifera | Rootworm | |
| 392 | Diabrotica | Western Corn | NFFR2 |
| | virgifera virgifera | Rootworm | Frag1 |
| 393 | Diabrotica | Western Corn | SNFR Frag1 |
| | virgifera virgifera | Rootworm | |
| 394 | Diabrotica | Western Corn | RFPR Frag1 |
| | virgifera virgifera | Rootworm | |
| 395 | Diabrotica | Western Corn | DFD Frag1 |
| | virgifera virgifera | Rootworm | |
| 396 | Diabrotica | Western Corn | ANTP Frag1 |
| | virgifera virgifera | Rootworm | |
| 397 | Diabrotica | Western Corn | ABD-A |
| | virgifera virgifera | Rootworm | Frag1 |
| 398 | Diabrotica | Western Corn | ABD-B |
| | virgifera virgifera | Rootworm | Frag1 |
| 399 | Diabrotica | Western Corn | LAB Frag1 |
| | virgifera virgifera | Rootworm | |
| 400 | Diabrotica | Western Corn | PB Frag1 |
| | virgifera virgifera | Rootworm | |
| 401 | Diabrotica | Western Corn | SCR Frag1 |
| | virgifera virgifera | Rootworm | |
| 402 | Diabrotica | Western Corn | UBX Frag1 |
| | virgifera virgifera | Rootworm | |
| 403 | Diabrotica | Western Corn | WG |
| | virgifera virgifera | Rootworm | Frag1 |
| 404 | Diabrotica | Western Corn | CI Frag1 |
| | virgifera virgifera | Rootworm | |
| 405 | Diabrotica | Western Corn | PTC Frag1 |
| | virgifera virgifera | Rootworm | |
| 406 | Diabrotica | Western Corn | LGS Frag1 |
| | virgifera virgifera | Rootworm | |
| 407 | Diabrotica | Western Corn | HH Frag1 |
| | virgifera virgifera | Rootworm | |

### Example 2: Western Corn Rootworm (WCRW) Adult Sterilization by VgR dsRNA

[0262] Artificial diet for WCRW adults was prepared using a modified protocol (Rangasamy M et al. (2012). Pest Manag. Sci. 68(4):587-91; and Nowatzki T M, et al. (2006) J Econ. Entomol. 99(3):927-30). The modified diet was designed for use in the diet incorporated bioassay described herein below (25 μl test sample:75 μl prepared diet) and was produced using standard 96-well micro-titer plates. WCRW adults consumed significant proportions of the diet within 24 hours, and control mortality remains <15% during the 2-3 week study period. For all the bioassays described herein, WCRW life stages (adults and larvae) were kept under standard conditions, for example, Jackson, J. J. (1986), pp 25-48. In Krysan J. L. and Miller T. A. (eds): Methods for the Study of pest Diabrotica. Springer-Verlag, New York. 260 pp, and Branson, T. F., et al. (1988), J. Econ. Entomal. 81(1): 410-414 (1988).

[0263] Beetles from the same batch were categorized in to two groups. The first test group consisted of male and females of <10 days old (range 2-5 days old) (hereinafter referred to as “younger females”). The younger females were in their preoviposition period (the period before oviposition of the first eggs). The second group consisted of >11 days old and mated females (hereinafter referred to as “older females”) and they were in oviposition period (females are ready to lay eggs). For the younger female group 100 beetles (50 females and 50 males) and for the older female group 50 mated females were arranged for each treatment. The following three treatments were compared 1) sterile DI water (control); 2) GFP dsRNA (negative control, GenBank Accession # AY233272.1; SEQ ID NO: 104 herein); and 3) VgR dsRNA fragment 2 (SEQ ID NO: 4). The bioassay was carried out using a diet incorporation methodology. Test samples of GFP dsRNA and VgR dsRNA were prepared separately and 25 μl of the respective samples were incorporated into 75 μl of modified WCRW adult artificial diet per well in 96-well micro-titer plates for a final concentration of 100 ppm. For control 25 μl of sterile DI water was incorporated into 75 μl of modified WCRW adult artificial diet per well.

[0264] The effects on individual WCRW adult beetle were confined using individual wells of 32 cell trays (C-D International, Pitman, N.J.) provided with single diet pill (mixture of 25 μl test sample and 75 μl of modified WCRW adult artificial diet) for 24 hours. After 24 hour, treated adults were collected, counted and transferred to their respective holding cages and provided standard SCRW dry adult diet and water source until the end of the study period (22-25 days).

[0265] WCRW eggs were collected daily for 13-14 days starting from 24 hour or 7 days after exposure for the older and younger female group, respectively. Eggs were collected using oviposition dish. Collected eggs were incubated in a heat and humidity controlled growth chamber (25° C., 65%±5% relative humidity (RH)) with controlled light/dark cycles (16 hr light:8 hr darkness) for 12-14 days before processing.

[0266] Several small aliquots of egg-agar suspensions were dispensed onto a hatch plate (petri-dish containing 2% water agar and two layers of filter paper) for counting and/or hatch test depending on the number of eggs obtained for a given day. For the egg hatch test, samples (1-6) each containing 25 μl of egg-agar suspension were dispensed onto the hatch plate as described above and the lids secured with micropore tape to avoid larval escape. Total number of eggs in each 25 μl sample was counted prior incubation. Egg hatch plates were then incubated in a heat and humidity controlled growth chamber (25° C., 65%±5% RH) with controlled light/dark cycles (16 hr light:8 hr darkness) for three days. Egg hatch was counted over three days period by counting the number of eggs showing larval emergence hole. For each treatment, four treated female and male beetles (younger female group) and four females (older female group) were sampled for gene suppression at 4 and 8 days after exposure for the older and younger female group respectively.

[0267] For dsRNA in vitro transcript (“IVT”) production, PCR was performed using target specific forward and reverse primers (see Table 2 below) with a T7 promoter sequence at the 5′ end of each primer. The dsRNA samples were produced from PCR template using Ambion Megascript High Yield Transcription Kit (Thermo Fisher Scientific, Grand Island, N.Y.). An agarose gel was run to check for yield and product size. For real time qRTPCR assay, total RNA was extracted with MirVana miRNA Isolation Kit, treated by TURBO DNase Kit, assayed by SuperScript® III Platinum® One-Step qRT-PCR Kit with ROX according to manufacturer's instructions (Thermo Fisher Scientific). Relative expression was derived by delta delta Ct method (Livak, K. J. and T. D. Schmittgen (2001). Methods 25(4): 402-408) using WCRW RPS10 as reference (i.e., SEQ ID NO: 8 in US 2011/0054007; also SEQ ID NOs.: 102 and 103, ORF and transcript, respectively, herein).

TABLE 2
Primer Sequences IVT Production.

| | Forward Primer | Reverse Primer |
|---|---|---|
| Fragment ID | SEQ ID NO. | SEQ ID NO. |
| DV-VGR-FRAG1 | 54 | 55 |
| DV-VGR-FRAG2 | 56 | 57 |
| DV-VGR-FRAG3 | 58 | 59 |
| DV-VGR-FRAG4 | 60 | 61 |
| DV-VGR-FRAG5 | 62 | 63 |
| DV-VGR-FRAG6 | 64 | 65 |
| DV-VGR-FRAG7 | 66 | 67 |
| DV-VGR-FRAG8 | 68 | 69 |
| DV-VGR-FRAG9 | 70 | 71 |
| DV-VGR-FRAG10 | 72 | 73 |
| DV-VGR-FRAG11 | 74 | 75 |
| DV-VGR-FRAG12 | 76 | 77 |
| DV-VGR-FRAG13 | 78 | 79 |
| DV-VGR-FRAG14 | 80 | 81 |
| DV-VGR-FRAG15 | 82 | 83 |
| DV-VGR-FRAG16 | 84 | 85 |
| GFP | 86 | 87 |
| GUS | 88 | 89 |

[0268] Data obtained using these methods are shown in FIGS. 1A-1D. In particular, FIG. 1A shows the total number of eggs produced within 13-14 days by treatment and age group. In the experiment shown in FIG. 1A, the younger female group contained 50 pairs of male and female beetles, whereas the older female group had 50 mated female beetles. The data in FIG. 1A show that ingestion of the VgR dsRNA significantly reduced the total number of eggs produced during the test period. FIG. 1B shows the average number of eggs produced per female/day during 13-14 day oviposition period by treatment and age group. The box plot shows 4 quartiles, average, and 95% confidence interval of the mean. The data show that in both younger and older females, ingestion of the VgR dsRNA reduced the average number of egges produced per day. FIG. 1C shows the effect of various treatments on overall average egg hatch rate. Data represents 13-14 days egg collection period; n=6 replication/treatment/day; 5-45 eggs/replication depending on the day (p<0.001). Gene suppression analysis is shown in FIG. 1D for analysis carried out on WCRW adult beetles 8 days after treatment of female and male insects for younger age group and 4 days after treatment of female insects for older age group. Relative expression of VgR is shown from 4 individual insects for each treatment using WCRW RPS10 gene as reference and untreated older beetle as normalizer. The box plot shows 4 quartiles, average, median, and 95% confidence interval of the mean by treatment and age group.

### Example 3: WCRW Sterilization by Treatment of 3rd Instar Larvae with VgR dsRNA

[0269] The effect of treatment of larva on WCRW sterilization by VgR dsRNA (VgR dsRNA fragment 2) was assessed. The study was carried out using 3rd instar larvae that were harvested from corn mats and acclimatized on standard WCRW larval diet for 24 h. About 192 larvae were exposed to water and 75 ppm VgR dsRNA fragment 2 (SEQ ID NO: 4) for 1 day using the diet incorporation method described above (25 μl dsRNA and 75 μl artificial WCRW larval diet). Treated larvae were placed in pupation medium for 15 days. Emerged adults were collected, counted, and transferred to their respective holding cages and provided standard SCRW dry adult diet with a water source until the end of the study period (22-25 days). Beetle holding cages were kept at room temperature (usually from 22-25° C.) with no RH control. No intentional light/dark control but cages were getting roughly 16:8 Dark and light condition. Beetle holding cages were cleaned maintained twice a week and each time the beetles received new food and water agar. Adult beetles were kept for a total of 26 days. Each cage received oviposition dishes after 10 days preoviposition period and eggs were collected over a period of for 16 days oviposition period, and processed following the method described above.

[0270] Representative data for this study are shown in FIGS. 2A and 2B. The average total number of eggs produced per female and the average number of viable eggs produced per female are shown in FIG. 2A. Eggs from 15-42 female adult beetles were counted for each indicated treatment. The box plot of shows 4 quartiles, average, median, and 95% confidence interval of the mean for each treatment. The data show that for the VgR dsRNA exposed group, the viable egg production remained very low throughout the study period. It should be noted that treatment with VgR dsRNA did not affect adult emergence, and that mortality of adult beetles in the VgR dsRNA group was negligible.

[0271] Representative data for VgR gene suppression analysis is shown in FIG. 2B. The data were obtained for 10-day old (n=4) and 28-day old (n=15) beetles, which represents day 40 and day 58, respectively, following treatment of the 3^{rd} instar larvae. The box plot of relative expression by qRTPCR shows 4 quartiles, average, median, and 95% confidence interval of the mean for each treatment in 10 and 28 day old beetles. The data were normalized to untreated 3rd instar larvae. The data show decreased relative expression of VgR in both age groups.

### Example 4: Dose Response of WCRW Sterilization and Gene Suppression by VgR dsRNA Treatment

[0272] The dose response effect of dsRNA treatment was determined in younger and older adult females. The older female group (>11 days old) was collected and exposed VgR dsRNA using the diet incorporation methodology described above. The treatment groups were exposed for 24 hours. The VgR dsRNA was complementary to SEQ ID NO: 3, and the concentrations tested were as follows: 0, 0.01 ppm, 0.1 ppm, 1 ppm, 10 ppm and 75 ppm. The treatment groups consisted of about 40-48 females for each dose level. Egg production was assessed starting 24 hours after exposure and continued for 18 days. For each treatment, the total number of female beetles used for egg production varies from 40-48 (days 1-6) and 20-28 (days 7-18). Eggs were handled and processed following the methods described above. Six day after exposure 20 treated females were retrieved from each treatment and were used for gene suppression analysis.

[0273] The details for each dose treatment group (e.g. number of total eggs analyzed, number of viable eggs, and net reduction in fecundity) are given in FIG. 3A. Eggs were collected and counted over the 18 day oviposition period. The net reduction in fecundity (NRF) of VgR dsRNA-treated females relative to control (water exposed females) was estimated using the following formula:

NRF (%)=[1−(NVEt/NVEwc)]*100,

where “NRF” represents the net reduction in fecundity as a percent; “NVEt” represents the number of viable eggs in the treatment group; and “NVEwc” represents the number of viable eggs in water (control) treated group. The data show a significant reduction in egg production after 10 days of exposure to the VgR dsRNA (see eggs/female day 10-18 in FIG. 3A). The data further show that egg production and viability of eggs were negatively correlated with VgR dsRNA doses. The net reduction in fecundity was positively correlated with increased vgR dsRNA doses. FIG. 3B shows a box plot of percentage of overall egg hatch rates by dose for the 18 day egg collection period; n=1-4 replication/treatment/day; 5-478 eggs/replication depending on the day and availability of eggs. The data in FIG. 3C show a box plot of relative expression of VgR at day 6 after VgR dsRNA treatment at different doses. The data in FIG. 3C show the correlation of increasing dose with a larger decrease in expression of VgR. The treatment group data were normalized to the expression for untreated beetles.

### Example 5: Gene Suppression Analysis of VgR Fragments

[0274] The effect of five distinct VgR dsRNA target fragments was assessed. FIG. 4A shows schematically the relative position of the different fragments tested aligned against SEQ ID NO: 2. The target fragments tested were as follows: Frag1 is VgR fragment 1 (SEQ ID NO: 3); Frag2 is VgR fragment 2 (SEQ ID NO: 4); Frag3 is VgR fragment 3 (SEQ ID NO: 5); Frag4 is VgR fragment 4 (SEQ ID NO: 6); and Frag5 is VgR fragment 5 (SEQ ID NO: 7). Each VgR dsRNA fragment was tested using the diet incorporation methodology described above with WCRW female beetles with the VgR dsRNA at 100 ppm in the diet plug. The beetles were treated individually for one day and fed with standard diet with no dsRNA for an additional six days. The individual beetles were then collected and flash frozen in in liquid nitrogen. For the qRTPCR assays, at least 3 insects were used for each treatment group using the primer sequences indicated in Table 3 below. FIG. 4B shows a box plot of the relative VgR expression at day 6 after treatment with the indicated dsVgR fragments or control treatment (i.e., ddH2O and dsGUS (SEQ ID NO: 105, herein), as indicated, replacing the VgR dsRNA in the diet) using 5′ qRTPCR assay. The box plot shows four quartiles: average (horizontal solid line), median (horizontal dash line), and 95% confidence interval of the mean are shown. Similar results were also obtained with Mid- and 3′-qRTPCR assays. The data in the treatment groups were normalized to data obtained from qRTPCR from untreated 3rd instar larvae.

TABLE 3
Primer Sequences Gene Suppression Analysis.

| | | | | Amplicon |
|---|---|---|---|---|
| qRTPCR | Forward Primer | Reverse Primer | Amplicon SEQ | Length |
| Assay ID | SEQ ID NO. | SEQ ID NO. | ID NO. | (nc) |
| DV-VgR 5′ | 90 | 91 | 92 | 147 |
| DV-VgR mid | 93 | 94 | 95 | 140 |
| DV-VgR 3′ | 96 | 97 | 98 | 78 |
| DV-RPS10 | 99 | 100 | 101 | 77 |

### Example 6: WCRW VgR Fragment Screen by Gene Suppression Analysis

[0275] Additional VgR dsRNA fragments covering the entirety of the coding DNA sequence of SEQ ID NO: 2 were assessed for ability to suppress expression of VgR. The fragments tested are shown aligned against SEQ ID NO: 2 in FIG. 5A, and the various sequence names correspond to the fragment ID shown in Table 1. Each VgR dsRNA fragment was tested using the diet incorporation methodology described above with WCRW female beetles with the VgR dsRNA at 100 ppm in the diet plug. The beetles were treated individually for one day and fed with standard diet with no dsRNA for 6 additional days. The individual beetles were then collected and flash frozen in in liquid nitrogen. For the qRTPCR assays, at least 6 insects were used for each treatment group. FIGS. 5B-5D box plots of the relative VgR expression at day 6 after treatment with the indicated dsVgR fragments or control treatment (i.e., ddH2O and dsGUS, as indicated, replacing the VgR dsRNA in the diet) using 5′ qRTPCR assay. The data in the treatment groups were normalized to data obtained from qRTPCR from water treated beetles. Two qRTPCR assays (5′- and Mid-qRTPCR assays) were used to avoid overlapping of VgR fragment and PCR amplicon.

### Example 7: Agrobacterium-Mediated Transformation of Maize

[0276] For Agrobacterium-mediated transformation of maize with a silencing element of the invention, the method of Zhao is employed (U.S. Pat. No. 5,981,840, and PCT patent publication WO98/32326; the contents of which are hereby incorporated by reference). Such as a construct can, for example, express a long double stranded RNA of the target sequence set forth in table 1. Such a construct can be linked to a promoter. Briefly, immature embryos are isolated from maize and the embryos contacted with a suspension of Agrobacterium, where the bacteria are capable of transferring the polynucleotide comprising the silencing element to at least one cell of at least one of the immature embryos (step 1: the infection step). In this step the immature embryos are immersed in an Agrobacterium suspension for the initiation of inoculation. The embryos are co-cultured for a time with the Agrobacterium (step 2: the co-cultivation step). The immature embryos are cultured on solid medium following the infection step. Following this co-cultivation period an optional “resting” step is contemplated. In this resting step, the embryos are incubated in the presence of at least one antibiotic known to inhibit the growth of Agrobacterium without the addition of a selective agent for plant transformants (step 3: resting step). The immature embryos are cultured on solid medium with antibiotic, but without a selecting agent, for elimination of Agrobacterium and for a resting phase for the infected cells. Next, inoculated embryos are cultured on medium containing a selective agent and growing transformed callus is recovered (step 4: the selection step). The immature embryos are cultured on solid medium with a selective agent resulting in the selective growth of transformed cells. The callus is then regenerated into plants (step 5: the regeneration step), and calli grown on selective medium are cultured on solid medium to regenerate the plants.

### Example 8: WCRW VgR Transgenic Feeding Bioassay

[0277] Transgenic maize plants for VgR Frag1, Frag2 and Frag3 were generated using the methods described herein above and used in adult feeding bioassays for gene suppression analysis in WCRW beetles as described herein above. The expression levels of the VgR fragments in planta were determined in leaf samples using in vitro transcription (IVT) products as controls. The expression analyses were carried out according to manufacturer's instruction (Quantigene 2.0 Assay, Affymetrix, Santa Clara, Calif. 95051). The average VgR fragment expression level (pg VgR fragment/mg fresh plant weight) in leaves is indicated at below each graph in FIGS. 6A and 6B. FIG. 6A shows data obtained from three young plants at about the V4 growth stage for either a non-transgenic control (NTG) or the indicated transgenic planted expressing the indicated fragment VgR Frag1 (SEQ ID NO: 3), Frag2 (SEQ ID NO: 4), and Frag3 (SEQ ID NO: 5). The test plants were infested with at least 14 young female beetles in cages. The beetles were collected at 8 days after feeding and used for gene suppression analysis. Data were normalized to expression levels obtained in beetles exposed NTG plants. FIG. 6B shows results obtained using either non-transgenic control plants or transgenic plants expressing the indicated VgR dsRNA fragment. The individual R1 maize plants were infested with at least 6 young female beetles in cages. Beetles were collected 12 days after feeding for VgR expression analysis. Each fragment and control is represented by 2 plants used for feeding and more than 12 insects used in gene suppression analysis, and data were normalized to data obtained from non-trangenic control plants exposed under similar conditions.

### Example 9: WCRW Adult VgR Transgenic Exposure Bioassay

[0278] At least 32 pairs of newly emerged adult beetles were exposed to 8 days to above ground plant part of T1 transgenic events or non-transgenic (NTG) control plants. Beetles were recollected and at least 13-37 female beetles were arranged in a cage for each treatment and maintained for 15 days for fecundity assessment. Transgenic constructs expressed VgR Frag1 (SEQ ID NO: 3), Frag2 (SEQ ID NO: 4), or Frag3 (SEQ ID NO: 5). For each construct 2-4 events were tested (FIG. 7). Each cage received oviposition dish daily and/or at interval of 2-4 days and eggs were processed following the method described in Example 2.

### Example 10: WCRW Larval VgR Transgenic Exposure Bioassay

[0279] Maize T1 plants expressing silencing elements (targeting SEQ ID NOs: 3, 4, and 5) were transplanted from culture plates into greenhouse flats containing Fafard Superfine potting mix. Three positive individual plants (of same event) were transplanted and maintained in a greenhouse (80° F., 15 hr light:9 hr darkness) and watered as needed. When the plants reached the V2 leaf stage, each pot was infested with 200 non-diapausing D. virgifera virgifera eggs. Plants were monitored daily for first beetle emergence. The number of adult D. virgifera virgifera that emerged from each pot was determined in the greenhouse in a similar manner as described by Meihls et al. (2008) PNAS 105: 19177-19182. Adult beetles emerged from T1 transgenic events and non-transgenic (NTG) control plants as in Example 9 were collected every 2 or 3 days and maintained for 15 days for fecundity assessment. For each event three replicate cages containing at least 8-14 pairs of male and female beetles were arranged. Each cage received oviposition dish every 5 days and eggs were processed following the method described in Example 2 (FIG. 8).

### Example 11: WCRW Adult Exposed Sterilization Bioassay and Gene Suppression by Treatment of dsRNA Targeting BOULE

[0280] Virgin adult beetles were obtained by rearing 3^{rd} instar larvae individually in a 50 mL falcon tube containing the pupation medium. Beetles were sexed upon emergence; starved for 24 hours and exposed at 100 ppm of dsRNA targeting the BOULE target gene (DV-BOULE-FRAG1, SEQ ID NO: 164) or controls (sterile water or GUS dsRNA) using diet incorporated method for one day. Treated beetles were provided untreated diet and kept in solitary confinement for additional 5 days. At least 12 treated beetles of mixed sex were collected in liquid nitrogen for gene suppression analysis. At least 14 pairs (male and female) were arranged for each treatment for subsequent mating and fecundity assessment. Due to delay in mating, oviposition was begun 19 days after emergence and egg production was assessed for 10 days. As shown in FIG. 9A, high dose adult exposure to dsRNA targeting BOULE (BOULE dsRNA, SEQ ID NO: 164) did not affect egg production and hatch rate of the eggs. FIG. 9B shows gene expression in beetles after BOULE dsRNA (SEQ ID NO: 164) treatment. Relative expression by qRTPCR assay was performed as in previous examples.

### Example 12: WCRW Beetle Counts from Larval Exposure to T1 Transgenic Plants Expressing dsRNA Targeting BOULE

[0281] Three maize seedlings of V2 leaf stage T1 transgenic events expressing dsRNA targeting BOULE using DV-BOULE-FRAG1 (SEQ ID NO: 164) and non-transgenic (NTG) control plants were infested with 200 WCR eggs per pot in greenhouse. Approximately one month after infestation, beetles emerged from each pot were captured every 2 or 3 days over 10 days. Average beetle numbers for the total and each sex (Male and Female) from at least 9 pots per event and 10 NTG control pots are shown. The box plot shows four quartiles, average (horizontal dash line), median (horizontal solid line), and 95% confidence interval of the mean. The results suggest that exposure of WCRW larvae to transgenic events expressing DV-BOULE FRAG1 (SEQ ID NO: 164) dsRNA did not affect adult emergence pattern when compared to NTG plants (FIG. 10). Average expression levels of the BOULE fragment in planta for each event were determined in root samples using in vitro transcription (IVT) product as control as described in Example 8.

### Example 13: WCRW Larval Exposure to Transgenic T1 Plants Expressing dsRNA Targeting BOULE Caused Adult Reduction of Fecundity

[0282] Beetles emerged from T1 transgenic events expressing DV-BOULE-FRAG1 (SEQ ID NO: 164) dsRNA and non-transgenic (NTG) control plants were maintained for 25 days for fecundity assessment. For each event three replicate cages containing at least 8-14 pairs of male and female beetles were arranged. Each cage received oviposition dish every 5 days and eggs were processed following the method described in Example 2 except that egg hatch duration was extended up to 8 days. FIG. 11A shows the effect of larval exposure to transgenic plants expressing DV-BOULE-FRAG1 (SEQ ID NO: 164) dsRNA on the overall average egg production per female and average viable eggs produced per female from emerged beetles. FIG. 11B shows the effect of larval exposure to transgenic plants expressing DV-BOULE-FRAG1 (SEQ ID NO: 164) dsRNA on hatch rate of eggs obtained from the emerged beetles. FIG. 11C indicates the effect of larval exposure to transgenic plants expressing DV-BOULE-FRAG1 (SEQ ID NO: 164) dsRNA on net reduction in fecundity of emerged adult beetles relative to NTG control.

### Example 14: WCRW 3^{rd} Instar Sterilization Bioassay of Exposure to dsRNA Targeting MAEL, NCLB and CUL3 at 1 ppm

[0283] Over 400 3rd instar larvae were exposed to 1 ppm of the respective dsRNA samples (DV-MAEL-FRAG1, SEQ ID NO: 46; DV-NCLB-FRAG1, SEQ ID NO: 45; and DV-CUL3-FRAG1, SEQ ID NO: 44) following the method described on Example 3. Water and GUS treatment were included as experimental controls. Treated larvae were separated into four groups, each containing about 95 to 100 treated larvae and placed in pupation medium for 15 days. Emerged adults were collected, counted, and transferred to their respective holding cages and handled as described in Example 3. After 10 days of oviposition period the number beetles in each replicate cage was adjusted to at least 12-16 pairs (male and female) and fecundity was assessed for 15 days. At least 2-3 replicate cages were setup for each treatment. The average total number of eggs produced per female, the average number of viable eggs produced per female, the average egg hatch rate; average reduction in egg production and net reduction in fecundity (both relative to water control) are shown in FIG. 12.

### Example 15: WCRW Sterile Gene Screening by 3^{rd} Instar Fecundity and Reduced Adult Emergence Bioassay at 50 ppm

[0284] The effect of treatment of larvae on WCRW fecundity or adult emergence by dsRNA targeting various genes of interest (GOI) was assessed using 3^{rd} instar. A set of 8-14 dsRNA samples including water and GUS control was tested at a time. The study was carried out using 10 day old 3rd instar larvae that were harvested from corn mats and acclimatized on standard WCRW larval diet for 24 hours. Diet incorporation method was used for exposing larvae to 50 ppm final concentration of the respective test dsRNA samples in 2 mL per well of 6-well plate. In few cases, an additional adult emergence assay was made at 100 ppm (for MEAL, NCLB and CUL3). A total of three 6-well plates were prepared for each sample and about 312 larvae were exposed to water or 50 ppm of target dsRNA fragment (GOI) for 1 day (˜104 larvae/plate; 16-18 larvae/well). After exposure, ˜10 3^{rd} instar larvae were sampled for gene suppression analysis and the remaining treated larvae were placed in pupation medium for 15 days.

[0285] To assess dsRNA targeting various GOIs effect on adult emergence, the treated larvae were allowed to complete pupation and adult emergence by placing in 2-3 pupation dishes. Total number of emerged beetles were counted for up to 6-10 days (or until no adult emergence for two consecutive days). Reduction in adult emergence (RAE) was estimated using the following formula:

RAE (%)=(1−(AEₜ/AE_{C)}))*100, where AEₜ is Adult emergence in treatment group

[0286] and AE_{c} is adult emergence in water control group.

Table 5 shows the results of reduced adult emergence of WCRW exposed to dsRNA targeting various GOIs.

[0287] To assess dsRNA targeting various GOIs effect on fecundity, emerged adults were collected, counted, and transferred to their respective holding cages and provided standard SCRW dry adult diet with a water source (water agar) until the end of the study period (˜26 days). Beetle holding cages were kept at room temperature (usually from 22-25° C.); 16:8 dark and light condition with no relative humidity control. After 10 days of preoviposition period, for each treatment the number of male and female pairs was adjusted to 16-20 pairs depending on beetle density and each cage received oviposition dishes and eggs were collected over a period of for 15 days oviposition period, and processed following the method described in Example 2. A set of three males and three females were sampled 10 and 25 days after emergence for gene suppression. Table 4 shows a consolidated summary of egg production, egg hatch and reduction in egg production and fecundity for active WCRW gene targets. Column 1 indicates GOI (gene of interest), column 2 and 3 indicate total egg production/female and total viable eggs/female respectively during the 15 days egg production period; column 4-5 indicate cumulative average egg hatch (±SEM); column 6 and 7 indicates average reduction in egg production (%) (±SEM); column 8 and 9 indicate average net reduction in fecundity (%) (±SEM). Note that values for controls (water and GUS) are cumulative average of 11 independent experiments, each run for the duration of 15 days of egg production period. Table 5 shows a consolidated summary of adult emergence and reduction of adult emergence from various GOIs.

TABLE 4
WCRW reduced fecundity gene screening by 3rd instar sterilization bioassay at 50 ppm*

| | | | | | Reduction in egg | | Net reduction | | |
|---|---|---|---|---|---|---|---|---|---|
| | | Total No. | Avg. Egg | | production | | in fecundity | | |
| | Total No. | fertile Eggs/ | hatch (%) ± | | (%) ± | | (%) ± | | SEQ ID |
| Target Gene | Eggs/female | female | (SEM) | | (SEM) | | (SEM) | | NO: |
| MEI | 0 | 0 | 0.0 | 0.0 | 100.0 | 0.0 | 100.0 | 0.0 | 133 |
| KNRL | 96 | 0 | 0.5 | 0.3 | 59.6 | 9.4 | 99.6 | 0.1 | 132 |
| TUD | 7 | 1 | 15.0 | 0.8 | 95.5 | 0.8 | 98.6 | 0.2 | 118 |
| CG3565 | 172 | 2 | 1.4 | 0.4 | 28.0 | 10.7 | 98.0 | 0.3 | 130 |
| CG17083 | 160 | 3 | 1.7 | 0.6 | 32.8 | 20.5 | 97.7 | 0.7 | 129 |
| DM | 96 | 8 | 8.7 | 2.7 | 73.5 | 6.0 | 95.7 | 1.0 | 125 |
| CYCA | 26 | 8 | 29.9 | 7.6 | 89.5 | 2.1 | 93.6 | 1.3 | 43 |
| HIRA | 63 | 5 | 7.6 | 1.8 | 57.5 | 6.5 | 93.1 | 1.1 | 116 |
| Poe | 41 | 8 | 16.8 | 2.9 | 74.2 | 7.2 | 91.9 | 2.2 | 113 |
| EGG | 52 | 20 | 38.7 | 2.9 | 85.8 | 4.7 | 89.8 | 3.4 | 126 |
| MR | 45 | 21 | 45.9 | 3.5 | 87.6 | 2.2 | 89.4 | 1.8 | 128 |
| HANG | 129 | 22 | 17.3 | 2.6 | 54.0 | 6.2 | 84.3 | 2.1 | 108 |
| HTS | 125 | 14 | 10.8 | 2.5 | 23.5 | 13.0 | 81.9 | 3.1 | 122 |
| GSKT | 82 | 26 | 32.3 | 3.4 | 67.7 | 4.8 | 80.6 | 2.9 | 40 |
| ADE2 | 70 | 28 | 40.3 | 8.3 | 75.1 | 7.0 | 80.1 | 5.6 | 107 |
| DLG1 | 202 | 39 | 19.3 | 4.8 | 44.3 | 7.1 | 79.9 | 2.6 | 124 |
| SU(VAR)205 | 132 | 32 | 24.3 | 4.7 | 52.7 | 9.3 | 77.3 | 4.4 | 111 |
| CDK7 | 148 | 45 | 30.1 | 3.6 | 59.2 | 7.0 | 77.1 | 3.9 | 123 |
| HRG | 200 | 50 | 25.2 | 4.5 | 45.0 | 9.4 | 74.2 | 4.4 | 127 |
| MBD-like | 85 | 17 | 20.4 | 3.4 | 41.2 | 11.9 | 74.0 | 5.3 | 114 |
| 11NUP44A | 112 | 29 | 26.1 | 2.8 | 46.2 | 12.5 | 70.4 | 6.9 | 120 |
| CASP | 150 | 27 | 18.0 | 4.8 | 13.4 | 12.4 | 70.2 | 4.3 | 42 |
| FAF | 101 | 30 | 29.8 | 3.5 | 51.5 | 7.9 | 69.5 | 5.0 | 119 |
| TWE | 257 | 38 | 14.9 | 1.7 | −7.6 | 10.3 | 67.4 | 3.1 | 134 |
| PORIN | 105 | 46 | 44.2 | 4.8 | 62.5 | 4.6 | 67.1 | 4.0 | 110 |
| PARK | 64 | 31 | 46.3 | 4.0 | 60.1 | 6.4 | 66.8 | 5.4 | 112 |
| PGLYM78 | 80 | 22 | 27.8 | 4.4 | 44.5 | 13.5 | 66.5 | 8.2 | 115 |
| WTS | 103 | 46 | 44.7 | 3.6 | 59.5 | 5.9 | 66.4 | 4.9 | 41 |
| PUF | 89 | 25 | 28.3 | 3.9 | 40.3 | 8.3 | 64.2 | 5.0 | 117 |
| KL3 | 130 | 55 | 42.4 | 7.8 | 53.4 | 8.7 | 60.8 | 7.3 | 109 |
| GUDU | 211 | 55 | 26.2 | 3.0 | 16.9 | 6.2 | 59.6 | 3.0 | 39 |
| CYCB | 214 | 49 | 22.7 | 2.6 | 10.2 | 6.9 | 58.6 | 3.2 | 131 |
| GEK | 136 | 36 | 26.2 | 2.3 | 17.4 | 9.9 | 52.6 | 5.7 | 121 |
| REPH | 183 | 72 | 39.2 | 4.0 | 27.7 | 12.5 | 47.3 | 9.1 | 165 |
| ARMI | 316 | 108 | 34.2 | 4.4 | 12.9 | 10.9 | 44.5 | 7.0 | 166 |
| loqs | 148 | 42 | 28.4 | 3.9 | 9.8 | 15.8 | 44.1 | 9.8 | 167 |
| SCNY | 165 | 72 | 43.5 | 3.2 | 31.0 | 5.1 | 39.0 | 4.5 | 168 |
| AGO3 | 186 | 46 | 24.9 | 2.5 | −13.7 | 14.0 | 38.1 | 7.6 | 169 |
| DIA | 288 | 124 | 43.0 | 4.9 | 20.8 | 9.9 | 36.5 | 7.9 | 170 |
| DNC | 274 | 101 | 37.0 | 3.3 | 9.5 | 21.5 | 36.1 | 15.2 | 171 |
| Chi | 269 | 103 | 38.2 | 3.8 | 11.3 | 18.3 | 35.3 | 13.3 | 172 |
| SXL | 188 | 66 | 35.2 | 3.6 | 10.2 | 13.7 | 33.3 | 10.2 | 173 |
| SLGA | 199 | 94 | 47.1 | 3.9 | 21.5 | 8.1 | 31.3 | 7.1 | 174 |
| PAPLA1 | 150 | 53 | 35.4 | 2.7 | 8.7 | 11.6 | 29.4 | 8.9 | 175 |
| GUS* | 187 | 88 | 43.8 | 1.3 | 12.1 | 4.3 | 16.8 | 5.1 | |
| H20* | 217 | 110 | 50.0 | 1.0 | | | | | |

*Column 1 indicates GOI (gene of interest), column 2 and 3 indicate total egg production/female and total viable eggs/female respectively during the 15 days egg production period; column 4-5 indicate cumulative average egg hatch (± SEM); column 6 and 7 indicates average reduction in egg production (%) (± SEM); column 8 and 9 indicate average net reduction in fecundity (%) (± SEM). Note that values for controls (water and GUS) are cumulative average of 11 independent experiments, each run for the duration of 15 days of egg production period.

TABLE 5
WCRW reduced adult emergence gene screening by 3rd instar sterilization bioassay at
50 ppm

| GOI | | Avg. | | | | | RAE % |
|---|---|---|---|---|---|---|---|
| Target | | neonate | | No. of treated | No. of adult | Adult | (Reduction in |
| SEQ ID | | diet assay | ± SEM | 3rd instar into | beetles | emergence | Adult |
| NO: | GOI | Score | (score) | pupation | emerged | (%) | Emergence) |
| 36 | DV-CUL3 | 1.4 | 0.38 | 385.00 | 0.00 | 0.00 | (100)* |
| 278 | DV-BEL | 0.4 | 0.18 | 188.00 | 0.00 | 0.00 | 100 |
| 279 | DV- MAGO | 0.9 | 0.30 | 277.00 | 0.00 | 0.00 | 100 |
| 280 | DV-POLO | 1.5 | 0.19 | 279.00 | 0.00 | 0.00 | 100 |
| 281 | DV-RPS27A | 2.8 | 0.16 | 280.00 | 0.00 | 0.00 | 100 |
| 282 | DV-VPS4 | 1.3 | 0.18 | 278.00 | 0.00 | 0.00 | 100 |
| 283 | DV-CDC42 | 0.0 | 0.00 | 272.00 | 0.00 | 0.00 | 100 |
| 284 | DV-CHC | 2.3 | 0.16 | 366 | 0 | 0 | 100 |
| 285 | DV-EIF-2A | 1.9 | 0.23 | 278.00 | 0.00 | 0.00 | 100 |
| 286 | DV-HSP60B | 0.0 | 0.00 | 380.00 | 0.00 | 0.00 | 100 |
| 287 | DV-KHC | 0.0 | 0.00 | 278.00 | 0.00 | 0.00 | 100 |
| 288 | DV-PAR | 2.0 | 0.27 | 278.00 | 0.00 | 0.00 | 100 |
| 289 | DV-PCNA | 0.0 | 0.00 | 272.00 | 0.00 | 0.00 | 100 |
| 290 | DV- | 2.0 | 0.00 | 190.00 | 0.00 | 0.00 | 100 |
| | PROSA6T | | | | | | |
| 291 | DV-SMT3 | 1.6 | 0.24 | 279.00 | 0.00 | 0.00 | 100 |
| 292 | DV-SNR1 | 1.3 | 0.27 | 280.00 | 0.00 | 0.00 | 100 |
| 293 | DV-TSR | 2.3 | 0.16 | 274.00 | 0.00 | 0.00 | 100 |
| 294 | DV-NXT1 | 1.0 | 0.27 | 279.00 | 1.00 | 0.40 | 100 |
| 295 | DV-CK1A | 1.8 | 0.25 | 277.00 | 1.00 | 0.40 | 99 |
| 296 | DV-SQH | 1.0 | 0.33 | 280.00 | 1.00 | 0.40 | 99 |
| 297 | DV-CTBP | 0.0 | 0.00 | 277.00 | 2.00 | 0.70 | 99 |
| 298 | DV-GAS8 | 0.0 | 0.00 | 277.00 | 2.00 | 0.72 | 99 |
| 299 | DV-KLP61F | 0.9 | 0.23 | 247.00 | 2.00 | 0.81 | 99 |
| 300 | DV- | 1.9 | 0.35 | 268.00 | 2.00 | 0.70 | 99 |
| | DHC64C | | | | | | |
| 301 | DV-AOS1 | 0.0 | 0.00 | 375.00 | 4.00 | 1.10 | 98 |
| 302 | DV-TOP1 | 0.3 | 0.16 | 263.00 | 4.00 | 1.50 | 97 |
| 303 | DV-APKC | 0.0 | 0.00 | 277.00 | 4.00 | 1.40 | 97 |
| 304 | DV-CAPT | 1.9 | 0.15 | 280.00 | 7.00 | 2.50 | 97 |
| 305 | DV-CSN5 | 1.4 | 0.26 | 285.00 | 5.00 | 2.00 | 97 |
| 306 | DV-FZO | 0.0 | 0.00 | 281.00 | 7.00 | 2.49 | 97 |
| 307 | DV-A-SPEC | 0.5 | 0.19 | 267.00 | 9.00 | 3.40 | 96 |
| 308 | DV-B-TUB60D | 0.0 | 0.00 | 274.00 | 6.00 | 2.00 | 96 |
| 309 | DV-SCRIB | 0.9 | 0.35 | 275.00 | 7.00 | 3.00 | 95 |
| 310 | DV-B-TUB56D | 1.4 | 0.38 | 280.00 | 12.00 | 4.29 | 94 |
| 311 | DV-EIF5 | 0.0 | 0.00 | 372.00 | 21.00 | 5.65 | 91 |
| 312 | DV- | 0.3 | 0.16 | 273.00 | 13.00 | 4.80 | 91 |
| | L(3)01239 | | | | | | |
| 313 | DV-EFF | 0.8 | 0.25 | 279.00 | 20.00 | 7.17 | 90 |
| 314 | DV-ME31B | 0.3 | 0.16 | 276.00 | 20.00 | 7.25 | 90 |
| 315 | DV-ZIP | 0.4 | 0.18 | 278.00 | 21.00 | 7.55 | 90 |
| 316 | DV-PBL | 0.0 | 0.00 | 378.00 | 29.00 | 7.67 | 88 |
| 317 | DV-R | 0.3 | 0.18 | 276.00 | 21.00 | 7.60 | 86 |
| 318 | DV- | 0.5 | 0.38 | 362 | 25 | 6.91 | 85 |
| | CG13298 | | | | | | |
| 319 | DV-TAF1 | 0.9 | 0.35 | 279.00 | 48.00 | 17.20 | 79 |
| 320 | DV-APC | 0.1 | 0.13 | 277.00 | 60.00 | 21.70 | 74 |
| 321 | DV-PUF68 | 0.1 | 0.13 | 280.00 | 40.00 | 14.00 | 74 |
| 322 | DV-RIN | 0.1 | 0.14 | 277.00 | 47.00 | 17.00 | 69 |
| 38 | DV-MAEL | 0.0 | 0.00 | 387.00 | 77.00 | 20.00 | 67 (9.21)* |
| 37 | DV-NCLB | 0.0 | 0.00 | 384.00 | 87.00 | 23.00 | 63 (6.58)* |
| 132 | DV-KNRL | 0.0 | 0.00 | 278.00 | 77.00 | 27.70 | 63 |
| 124 | DV-DLG1 | 0.1 | 0.13 | 275.00 | 90.00 | 32.73 | 56 |
| 323 | DV-CG8116 | 0.0 | 0.00 | 276.00 | 135.00 | 48.91 | 34 |
| 324 | DV-CHD1 | 0.1 | 0.13 | 272.00 | 97.00 | 35.70 | 28 |
| 126 | DV-EGG | 0.1 | 0.13 | 277.00 | 165.00 | 59.57 | 20 |

*Number in parenthesis is the RAE % as tested at 100 ppm; first number is the RAE % as tested at 50 ppm. Column 2 indicates GOI (gene of interest); columns 3 and 4 indicate average neonate score ( ± SEM) following 7 day neonate exposure assay; column 5 indicates the total number of treated 3rd instar larvae that were placed in pupation dish to complete development; column 6 indicates the total number of adult WCR emerged; column 7 indicate total adult emergence in percent; and column 8 indicates percent reduction in adult emergence relative to water control.

### Example 16. Expression of Silencing Elements Targeting at Least Two Life Stages in Stacked Transgenic Maize

[0288] For Agrobacterium-mediated maize transformation of stacked transgenic maize, the method of Zhao is employed (U.S. Pat. No. 5,981,840 and International Patent Publication Number WO 1998/32326). Briefly, immature embryos are isolated from maize and the embryos contacted with an Agrobacterium Suspension, where the bacteria are capable of transferring a polynucleotide encoding a double stranded RNA targeting DvMAEL (SEQ ID NO: 38) and a polynucleotide encoding a double stranded RNA targeting DvRyanR (SEQ ID NO: 255) to at least one cell of at least one of the immature embryos (step 1: the infection step). In this step the immature embryos are immersed in an Agrobacterium suspension for the initiation of inoculation. The embryos are co-cultured for a time with the Agrobacterium (step 2: the co-cultivation step). The immature embryos are cultured on solid medium with antibiotic, but without a selecting agent, for Agrobacterium elimination and for a resting phase for the infected cells. Next, inoculated embryos are cultured on medium containing a selective agent and growing transformed callus is recovered (step 4: the selection step). The immature embryos are cultured on solid medium with a selective agent resulting in the selective growth of transformed cells. The callus is then regenerated into plants (step 5: the regeneration step), and calli grown on selective medium were cultured on solid medium to regenerate the plants.

[0289] Transgenic maize plants positive for expression of both double stranded RNAs are tested for pesticidal activity using standard bioassays known in the art. Such methods include, for example, root excision bioassays and whole plant bioassays. See, e.g., US Patent Application Publication Number US 2003/0120054 and International Publication Number WO 2003/018810.

### Example 17. The Design of RNAi Chimera to Suppress Multiple Genes for a Combination of Larvacidal and Reduced Fecundity Effects

[0290] Different target genes may have activities against WCRW at different life stages and can provide control of larval damage on the root, adult emergence, and cause reduced fecundity as seen in table 5. Chimeras include male-specific BOULE, and MAEL, which results in both reduced fecundity and adult emergence control. Eighteen different chimeric silencing elements (SEQ ID NOs.: 260-277) incorporating BOULE and MAEL are designed to identify the candidates that has a high expression in planta and gives highest knockdown effects on both target genes after WCRW ingested plant tissues expressing chimeric silencing elements. Top chimera candidates are used to make further chimeric silencing elements with larvacidal RNAi target genes such as RyanR (SEQ ID NO: 255), HP2 (SEQ ID NO: 256), RPS10 (SEQ ID NO: 254), Coatamer subunit G (“CoatG,”SEQ ID NO: 257), Coatamer subunit A (SEQ ID NO: 258) or CPC (SEQ ID NO: 259) (see example of a chimeric silencing element in FIG. 1). Table 1 Presents possible gene targets for reduced fecundity in SEQ ID NOs: 1-53 or 107-253. A molecular stack is also made to suppress multiple RNAi targets and produce combinational RNAi effects to control different stages of WCRW (see an example of molecular stack construct in FIG. 13).

TABLE 5
Effects of different target genes on insecticidal activities
against WCRW at different life stages.

| Target | Target SEQ | Larvacidal | Adult | Reduced |
|---|---|---|---|---|
| Gene | ID NO: | (7-day)* | Emergence** | Fecundity*** |
| DvRyanR | 255 | strong | good | none |
| DvCoatg | 257 | good | strong | n/a |
| DvMael | 38 | none | good | strong |
| DvBoule | 135 | none | none | strong |

*Activities in diet feeding assay for 7-day. Strong activity included any LC₅₀ less than 0.2 ppm
**Greenhouse assay with about 90% reduction as strong and 50% to 89% as good.
***Greenhouse assay showed above 80% reduced fecundity as strong.

### Example 18. Modeling Evolution of Resistance by Western Corn Rootworm to Pyramid Products Stacking a Protein Trait and a New RNAi Sterility Trait(s)

[0291] To better inform advancement decisions about certain RNAi traits (DvBOULE, DvMAEL, and DvNCLB), a novel WCRW model was developed to evaluate the value of these new RNAi traits impacting fecundity to extend the durability of a novel protein trait.

[0292] The WCRW pyramid stacking a hypothetical protein trait and a sterile RNAi trait(s) were evaluated. Under the model, the male reduction of fecundity effect, which offers greater than 80% adult reproduction control on wild type males, could extend durability of the protein trait by approximately 50%. Under the model, the combination of the male reduction of fecundity effect (>80% control) and the female fecundity reduction (>60% control) could extend durability of the protein trait by 100-150%. Under the model, the higher the dose of the protein trait, the greater the durability extension for the pyramid. The absolute increase of the durability for the protein trait depends on the dose and novelty of the protein trait in the pyramid.

[0293] The WCRW model simulated the evolution of resistance by WCRW to a pyramid product stacking a protein trait and a sterile RNAi trait(s) in the US Corn Belt. The model adopted the larval survival of the protein trait in Pan et al., 2011, Environ. Entomol. 40: 964-978. The model is based on generation step, but it explicitly models the mating process between male and female adults. The model focuses on the larval mortality caused by the protein trait and adult fertility control caused by RNAi reduction of fecundity traits, either from male fecundity reduction or female fecundity reduction or both when mating matrix is applied in the mating process. It was assumed that the male fecundity reduction and female fecundity reduction are independent effects in the model. We excluded mortality effects on both adult and larval WCR by these RNAi traits.

[0294] Two autosomal, di-allelic, resistance genes were used for modeling a general two-gene model to simulate the evolution of resistance by WCRW to a pyramid product stacking a protein trait and a sterile RNAi trait(s) in the US Corn Belt. Gene 1 (A for wild type and B for resistance allele) conferred resistance to the protein trait. The BB genotype had a maximum survival of 1.0 (100%) on maize expressing the protein trait. Gene 2 (X for wild type and Y for resistance allele) conferred resistance to the RNAi trait(s). The YY genotype suffered no fecundity reduction in males and/or no female fecundity reduction on maize expressing the new RNA trait(s). There were in total 3×3=9 genotypes modeled for this pyramid. There was no cross resistance between the two simulated traits. The model assumed there were no fitness costs for resistance and no mutations occur after the start of the simulations.

[0295] Assumptions and parameters of the two-gene WCR Model were as follows:
[0296] One generation per year for WCR.
[0297] For RNAi sterility traits, selection by transgenic corn occurs at the larval stage, but it impacts the adult stage.
[0298] 10% structured refuge consists of non-transgenic corn only.
[0299] Random mating.
[0300] Eggs are uniformly distributed in landscape.
[0301] The protein trait and the sterility trait(s) do not have cross resistance.
[0302] The initial resistance allele frequency varies for the protein traits to represent used and novel traits.
[0303] AA and AB survival varies to evaluate the durability of the protein trait.
[0304] BB survival is 100%.
[0305] XX and XY have various sterile male effects, and may also have female fecundity reduction.
[0306] YY is resistant to reductions in fertility.
[0307] XX, XY and YY larvae are assumed to survive 100% on RNA trait(s).
[0308] All genotypes have 100% survival on refuge plants.

TABLE 6
Parameter list of WCR model for the pyramid
stacking a protein trait and a new RNai trait

| Parameters | | Value of Parameter Used |
|---|---|---|
| % block/strip/blended refuge | | 0/5/10 |
| Neonate survival | benchmark | 0.0125, 0.0625 and 1* |
| of AA, AB and | Lower than | 0.005, 0.03 and 1 |
| BB on protein | benchmark | |
| trait | Higher than | 0.05, 0.15 and 1 |
| | benchmark | |
| Male reduced | Benchmark | 0.8, 0.4 and 0** |
| fecundity of XX, | Higher than | 0.95, 0.5 and 0 |
| XY and YY | benchmark | |

| | |
|---|---|
| Female fecundity reduction of XX, XY | 0.6, 0.3 and 0*** |
| and YY | |
| Cross resistance between B and Y | None |
| IRAF of B | 0.001 for novel trait |
| | and 0.05 for used trait |
| IRAF of Y | 0.001 |

*survival is denoted as S(0.0125, 0.0625, 1) in the result tables.
**male fecundity reduction is denoted as M(0.8, 0.4, 0) in the result tables.
***female fecundity reduction is denoted as F(0.6, 0.3, 0) in the result tables.
****IRAF means initial resistance allele frequency

[0309] Durability of a trait is defined as the number of generations (years) in which the resistance allele frequency (RAF) exceeds 0.50 in the population. For this pyramid stacking model the protein trait and new RNA trait(s), the durability of the pyramid was specifically defined as the durability of the protein trait.

[0310] The male fecundity reduction effect, which offers great than 80% control, could extend durability of the protein trait by circa 50% (Tables 7 and 8). Under this model, the combination of the male fecundity reduction effect (>80% control) and the female fecundity reduction (>60% control) could extend durability of the protein trait by 100-150% (Tables 7 and 8). The higher the dose of the protein trait, the greater the durability extension for the pyramid (Tables 9 and 10).

[0311] A pyramid stacking protein trait used is presented in Table 11. Under this model, the absolute increase of the durability of the protein trait depends on the dose and novelty of the protein trait in the pyramid.

TABLE 7
Durability estimates (generations) in various refuge
proportions with benchmark parameter value

| | Refuge Proportion | | |
|---|---|---|---|
| Traits (Parameter Values) | 0 | 0.05 | 0.1 |
| Protein S(0.0125, 0.0625, 1) only | 4 | 9 | 15 |
| Protein S(0.0125, 0.0625, 1) + | 4 | 13 | 22 |
| RNAi M(0.8, 0.4, 0) | | | |
| Protein S(0.0125, 0.0625, 1) + | 4 | 20 | 35 |
| RNAi M(0.8, 0.4, 0) | | | |
| F(0.6, 0.3, 0) | | | |

* survival is denoted as S(0.0125, 0.0625, 1) in the result tables.
** male fecundity reduction is denoted as M(0.8, 0.4, 0) in the result tables.
*** female fecundity reduction is denoted as F(0.6, 0.3, 0) in the result tables.

TABLE 8
Durability estimates in various refuge
proportions with different male sterile rates

| | Refuge Proportion | | |
|---|---|---|---|
| Traits | 0 | 0.05 | 0.1 |
| Protein S(0.0125, 0.0625, 1) only | 4 | 9 | 15 |
| Protein S(0.0125, 0.0625, 1) + | 4 | 13 | 22 |
| RNAi M(0.8, 0.4, 0) | | | |
| Protein S(0.0125, 0.0625, 1) + | 4 | 15 | 25 |
| RNAi M(0.95, 0.5, 0) | | | |

* survival is denoted as S(0.0125, 0.0625, 1) in the result tables.
** male fecundity reduction is denoted as M(0.8, 0.4, 0) or M(0.95, 0.5, 0) in the result tables.

TABLE 9
Durability estimates in various refuge proportions
with higher survival on the protein trait

| | Refuge Proportion | | |
|---|---|---|---|
| Traits | 0 | 0.05 | 0.1 |
| Protein S(0.05, 0.15, 1) only | 6 | 9 | 12 |
| Protein S(0.05, 0.15, 1) + | 6 | 12 | 17 |
| RNAi M(0.8, 0.4, 0) | | | |
| Protein S(0.05, 0.15, 1) + | 6 | 15 | 25 |
| RNAi M(0.8, 0.4, 0) | | | |
| F(0.6, 0.3, 0) | | | |

* survival is denoted as S(0.05, 0.15, 1) in the result tables.
** male fecundity reduction is denoted as M(0.8, 0.4, 0) in the result tables.
*** female fecundity reduction is denoted as F(0.6, 0.3, 0) in the result tables.

TABLE 10
Durability estimates in various refuge proportions
with lower survival on the protein trait

| | Refuge Proportion | | |
|---|---|---|---|
| Traits | 0 | 0.05 | 0.1 |
| Protein S(0.005, 0.03, 1) only | 4 | 12 | 20 |
| Protein S(0.005, 0.03, 1) + | 4 | 18 | 31 |
| RNAi M(0.8, 0.4, 0) | | | |
| Protein S(0.005, 0.03, 1) + | 4 | 29 | 55 |
| RNAi M(0.8, 0.4, 0) | | | |
| F(0.6, 0.3, 0) | | | |

* survival is denoted as S(0.005, 0.03, 1) in the result tables.
** male fecundity reduction is denoted as M(0.8, 0.4, 0) in the result tables.
*** female fecundity reduction is denoted as F(0.6, 0.3, 0) in the result tables.

TABLE 11
Durability estimates in various refuge proportions with
a used protein trait (RAF = 0.05) and a new RNAi trait

| | Refuge Proportion | | |
|---|---|---|---|
| Traits | 0 | 0.05 | 0.1 |
| Protein S(0.0125, 0.0625, 1) only | 2 | 3 | 4 |
| Protein + RNAi M(0.8, 0.4, 0) | 2 | 4 | 6 |
| Protein + RNAi M(0.8, 0.4, 0) | 2 | 5 | 9 |
| F(0.6, 0.3, 0) | | | |

* survival is denoted as S (0.0125, 0.0625, 1) in the result tables.
** male fecundity reduction is denoted as M(0.8, 0.4, 0) in the result tables.
*** female fecundity reduction is denoted as F(0.6, 0.3, 0) in the result tables.

1. A DNA construct comprising a nucleic acid molecule encoding a first silencing element, wherein the first silencing element has insect larvacidal activity on an insect when ingested, and a second nucleic acid molecule encoding a second silencing element, wherein the second silencing element reduces the fecundity of the insect when ingested.

2. (canceled)

3. The DNA construct of claim 1, further comprising a third nucleic acid molecule encoding a third silencing element, wherein the third silencing element reduces the adult emergence of the insect when ingested.

4. A breeding stack comprising a first nucleic acid molecule encoding a first silencing element having larvacidal activity on an insect and a second nucleic acid molecule encoding a second silencing element that reduces the fecundity of the insect when ingested.

5. The breeding stack of claim 4, further comprising a third nucleic acid molecule encoding a third silencing element that reduces the adult emergence of the insect when ingested.

6. The breeding stack of claim 4, wherein either the first or the second silencing element reduces the adult emergence of the insect when ingested.

7. The breeding stack of claim 4, wherein the insect is a Coleopteran insect.

8.-12. (canceled)

13. The DNA construct claim 1, wherein all nucleic acid molecules encoding the silencing elements are operably linked to a heterologous regulatory element.

14. The DNA construct of claim 13, wherein the silencing element is a sense suppression element, an antisense suppression element, a double stranded RNA, a siRNA, an amiRNA, a miRNA, a multivalent RNA, or a hairpin suppression element.

15. The DNA construct of claim 13, further comprising at least one additional silencing element targeting a gene, wherein the downregulation of the second gene reduces fecundity of the insect, has larvicidal activity on the insect, or reduces adult emergence of the insect.

16. The DNA construct of claim 15, wherein the additional silencing element targets a gene which is expressed in either a male or a female specific pattern, and the target gene of the second silencing element is expressed in either a male or female specific pattern but not the same pattern as the target gene of the additional silencing element.

17. (canceled)

18. An expression cassette comprising a DNA construct of claim 17.

19. A host cell comprising the expression cassette of claim 18.

20. The host cell of claim 19, wherein the host cell is a bacterial cell.

21. The host cell of claim 19, wherein the host cell is a plant cell.

22. A transgenic plant or progeny thereof comprising the expression cassette of claim 18.

23. A transgenic plant or progeny thereof comprising the breeding stack of claim 4.

24. A transgenic plant or progeny thereof comprising the molecular stack of claim 8.

25.-28. (canceled)

29. A method for controlling an insect pest population comprising contacting the insect pest population with the transgenic plant of claim 22.

30. The method of claim 29, wherein the plant is a monocot.

31. The method of claim 30, wherein the monocot is maize, barley, millet, wheat or rice.

32. The method of claim 29, wherein the plant is a dicot.

33. The method of claim 32, wherein the dicot is kale, cauliflower, broccoli, mustard plant, cabbage, pea, clover, alfalfa, broad bean, tomato, cassava, soybean, canola, alfalfa, sunflower, safflower, tobacco, Arabidopsis, or cotton.

34.-42. (canceled)

43. A DNA construct comprising a nucleic acid molecule encoding a first silencing element, wherein the first silencing element reduces the fecundity of a male insect when ingested; a second nucleic acid molecule encoding a second silencing element, wherein the second silencing element reduces the fecundity of a female insect when ingested; and a nucleic acid molecule encoding an insecticidal protein.

44.-45. (canceled)

46. The DNA construct of claim 43, wherein the insect is a Coleopteran insect.

47. The DNA construct of claim 46, wherein the silencing element is a sense suppression element, an antisense suppression element, a double stranded RNA, a siRNA, an amiRNA, a miRNA, a multivalent RNA, or a hairpin suppression element.

48. An expression cassette comprising a DNA construct of claim 43.

49. A host cell comprising the expression cassette of claim 48.

50. The host cell of claim 49, wherein the host cell is a bacterial cell.

51. The host cell of claim 49, wherein the host cell is a plant cell.

52. A transgenic plant or progeny thereof comprising the expression cassette of claim 48.

53. A transgenic plant or progeny thereof comprising the breeding stack of claim 44.

54. A transgenic plant or progeny thereof comprising the molecular stack of claim 45.

The application's sequence listing, which the Patent Office published only in electronic form, follows.

SEQUENCE LISTING (407 sequences)

SEQ ID NO: 1 - DNA, 5612 bp, Diabrotica virgifera
tggtcagttcgtcctttaaaactgtgcgtgttaaactttttgaatatcttgtaaagtatgttaattttgttctttgtgctttcaacgttattaaatgcagtcgtttcaacgaataataatgattgccctccacatcagtttagatgcacaaattcaaaatgtatagactttcaacaaagatgtgatggttccgacaattgtggagatggatcggatgaactggattgtgatcataaatgtcatgaacattttttcaattgtcgaaatggaagatgtataagcgaagcattcctgtgtgatggtgaaaatgattgtaataactttttggatgaaaaagactgtaagggtcaaacggtgctaactctcgaaactgatggccattgcgaagatggtcattggaagtgtgccgataaattgtgtattccacttgacatggtatgtaatggcgcacctgaatgtttggatggatcagatgaaactattggatgcagtaacaagatcgtttgtgatggatttaaatgtaaaaatggccattgcataccaactgaatgggcttgcgacggtcttgatgattgtggtgataaaactgatgaacaagattgcgcaaaccacgtaccacttgatcaatgcactttggataaaagaaaattcttgtgtagtaacaataaaacttgcatagatcttcactcggtctgtgataataagttagattgtcccgattattctgatgaaggaaaacagtgcaattcgtctgcaatatcatgtaacaataacaaatgttctcatacatgtatatcacttccaacgggtccaaaatgtctgtgtccgaatggttaccatacgcttgatgattcgaattgtttggatattaatgaatgtacaacttatggaatttgtgaccaaaaatgtagaaatcttcctggatcatacgaatgctactgtgatgataagtacacactccaagccgataaaaaaacatgtaaagcaactggcggaagcggaataatgatctttagttccaagcaggaaattcgagctttaaccttagattctttagattattttacagtggctaaagatttaaatcaagtagtgggaatagcatacgatggacatcatatttactggacagacgtatttactggacatgaaactatatcgaggtctattgaagatggatcggaaagggaggtattggtaacatctggactcagtctaccagaggatctagcgtatgattggttaactggtaatatttatttcaccgatgctctcaaacaacatgttggagtgtgttccaatgatggtcaccattgtacagttctagtcaacaaagatattcgaaaaccacgtgggattgttgttaatgtggaagctggagatatgtattggtctgattggggtgtaccagcagcaattggatattcacttatggatggatcccaggacaaaccgttcgtcaccaataatatacactggcccaatggtttggctctagatcaacctaactctagactttattggactgatgctaaaaagatgacactagaaagtattaatttagacggaactgatcaaaggatcgttttggaaggaatagtgaaacatccatatgccatcgctgtgtttgaaaacaaactttattggtcagattgggactcccataccattcaaacttgtgataagtttaatggtaaaaatcatcatacactcgtggaagaacataaaaatttaatctatggaatcagtatttttcactatgctctcgaaaagcgtctagtgaatccttgtgagcatgcttcctgtagtgacatttgtttattgaaggctcagtcatatgcttgtgcgtgcccagagaataaagttttggatacggatggtcatacgtgcaaagaagtacaaccaacgcaagcacttgtaggaggaactggacacgtgttggtatcaattaaacatcaatttctaggcaaacacgatgtaacattcctaccagacctggcgaaacacgtaggaagcttagcatttgatagttataaaaacattttgtatgtaagcgatttggaaacaaaaagtatagttgcgcttaacatgaacatcggaattagcaaaactcttgagatcgacggtcttggcaaagttacttcaatggattttgatccaaaaagtaataatttatacatttgcgatacggagaggctagtcgtagaaataattgatatgaataatctagaaagaaaaataattgtccatgacacatttggagaaactcctgaaagcattgcgttggtaccggaagatgggatcatgtttgttagctttaaacaagggaaattgggaaatagccacatcgaccgttttttcatggatggtactggaagaactcacgtcatcgaaaacggtttagtgggcccagttcgtgtagtatacgaccgcagtctttatagaattttctttgccgatctaagtactggggtaatagaatctactagcgcggccggtgacgatagacatcattttcgtactctgactacccatccagtaagtatagcagttttgaaagatgacctattgtggacaaatcttgactccaaggatttatattggtctgaaaaaagatctagcgagtcttatgagaagaaaattacgataggttttaaagaggataacgtcaacatccacttagtgtcagtaacacgtaaacaattagaaatcaatagctgtcgtgttaataataatggatgtagtcatctttgtcttcaatcccataaatcgatagtttgtgcatgtccagctggatgggagctatcggcaaatggttttacatgtaataaaagggtaacctgcgacaataaagagatgctttgtcctcattccaatacttgcgttctgaagagcttaaggtgcaatggttttaaagactgcgcatttggtgaagatgaatgggactgccaaactgtttcccaatgtttacctggccagtataaatgcgacgatggacagtgcatcagtgaagatttggtctgcaatcatagttatgactgtaaagataagtctgatgagtatggatgtgcagataaaaacaaaaaactaggatgtcctcccggacattttacctgtaaaagctccgaatgcatatctgaacgctttgtatgtgatgctttccatgattgcgatgatggatcagatgaactaaactgcgaaaataatatttgtttggaatctcagtttaggtgtgatgtcggaacttgcataccaaaagattgggaatgtgatggagaatatgactgtactgatagttcagatgagcattgttcttcagaagtttgtcagtctaactattttaagtgtgacaacaacagatgtatcgatcctaagcttcagtgcgatgggtttgatgactgcggtgatcactctgatgaaaaattcgagaaatgtttgcatcactcgaaagcaccaaaatgtacattggaagaattcgcgtgtattactaatacttccatttgtcttccaaaatcagctaaatgtaacggaacgtcagaatgtccgaataacgaagacgaaaaggattgttcaaaatgtgaagaagatgaatttgagtgcaagcataagcattatagagaatgtattcctaggtcctggatatgtgatggtacagatgattgcggtgataatagtgatgagagtatggaaacctgttcttcaaaacttaaacctgcggcagataactttgctgttactgactcgtgtctaaccggatatagatgtcatagcggtgcatgcataaatatgacctcagtatgcaataataaccacgattgttttgatggctctgatgaagatggcctctgttcttcatcttgtgtcggtgtgaaaaatccttgcaatcaaatatgcgtaaaaacaccatctggaccaagatgtgaatgtaaacctggatataagttgttaggagatggaaaaacttgtattgatgataatgaatgccaaacggatccaccaatctgtagtcagctatgtcacaataaagaaggaggctattcttgcgattgttacaataatttccttttaagttctaataaaaaatcttgtaaagctcacggaccaagaatgaccatatacttagtgatttacggaaaccaaatccgtcacctaattcctaaatcaaacacaatggctgttctttacaccaatccaatgataaaaatatccagcttggatactctggttaaaccaaaactaatcttcttcagttcttatgaaactcaagctatttataaacttgataccaccaccaacatgatgcactacatcagaaacgtaggtttccctagaacaattgcagttgattggtcaactcaaaacatttattacttcgatactgatgttaatggccggtccattagtgtttgcagttttgaagaaaagtgcgctaagttgataaatattgaatcgcctcgacatgtaactgccttagctgttgattccgtcaataaattgcttttctacgttttgaggaattggtgggtattagaaacaccaagcttcgtaatatacagtgtaaacttggatggatctaatagacaagaaatagtaaaaacaacaacgggcaatgttgaagatataactttcgatattaacaagaaacttttatactatactaacaaacaagatgaaagtatacacgaagtaagctacaaaggaggaccggttaaaactgtattttcaaatatctctcaaccagaaggacttaaattttttgagaaccaattatactatactgttgcaactggttatatagtcagttgtaagctatatggagacagatcctgcaatcccagatataaattacacacgtttgccagtggtcaatttgttattgagcaggaatcgcttcagcctaaagtagaaaatgtttgtactggacacaaatgtccatacttatgtgtaccagcagaatcaggatatagatgtctctgtcataacgggaaagttagtaatcattcagaaatttgtggtgaaaacgatgataatcagtcaggaaataatcacaaatttgctgtacatactacaccaatacagactgcatccgataaacattcaggagcagtggcctcagcaatattaattccactactattagtattccttggagcagtattttattatttgctaaaaaggagaggtgatactggattaaatataagcatgcgattttataacccactctacggaaaacctgtccgtgaagaccaaaaacaaatccttaaaccaggacaacacgagtacacaaatccgataattgtggccgaagaacatgaggaccacgcgaaagatgctagcagaatgctaaacgatagttgtgtttgttaagtttgtatctttttgttacgtcattctttgttttatgttttatataatcttataaacgttgttttaatcttttgaagtgtattaaaagcaaaatgactaattccattgttgaacatagcaatctatattaacatcaaaatagatacaaattattatttatctcttatatcaaacagtagaattaaaacttaagaggaaacagtggcgatcaacaggtggcgaaggcgcgttccaggattgcg

SEQ ID NO: 2 - DNA, 5313 bp, Diabrotica virgifera
atgttaattttgttctttgtgctttcaacgttattaaatgcagtcgtttcaacgaataataatgattgccctccacatcagtttagatgcacaaattcaaaatgtatagactttcaacaaagatgtgatggttccgacaattgtggagatggatcggatgaactggattgtgatcataaatgtcatgaacattttttcaattgtcgaaatggaagatgtataagcgaagcattcctgtgtgatggtgaaaatgattgtaataactttttggatgaaaaagactgtaagggtcaaacggtgctaactctcgaaactgatggccattgcgaagatggtcattggaagtgtgccgataaattgtgtattccacttgacatggtatgtaatggcgcacctgaatgtttggatggatcagatgaaactattggatgcagtaacaagatcgtttgtgatggatttaaatgtaaaaatggccattgcataccaactgaatgggcttgcgacggtcttgatgattgtggtgataaaactgatgaacaagattgcgcaaaccacgtaccacttgatcaatgcactttggataaaagaaaattcttgtgtagtaacaataaaacttgcatagatcttcactcggtctgtgataataagttagattgtcccgattattctgatgaaggaaaacagtgcaattcgtctgcaatatcatgtaacaataacaaatgttctcatacatgtatatcacttccaacgggtccaaaatgtctgtgtccgaatggttaccatacgcttgatgattcgaattgtttggatattaatgaatgtacaacttatggaatttgtgaccaaaaatgtagaaatcttcctggatcatacgaatgctactgtgatgataagtacacactccaagccgataaaaaaacatgtaaagcaactggcggaagcggaataatgatctttagttccaagcaggaaattcgagctttaaccttagattctttagattattttacagtggctaaagatttaaatcaagtagtgggaatagcatacgatggacatcatatttactggacagacgtatttactggacatgaaactatatcgaggtctattgaagatggatcggaaagggaggtattggtaacatctggactcagtctaccagaggatctagcgtatgattggttaactggtaatatttatttcaccgatgctctcaaacaacatgttggagtgtgttccaatgatggtcaccattgtacagttctagtcaacaaagatattcgaaaaccacgtgggattgttgttaatgtggaagctggagatatgtattggtctgattggggtgtaccagcagcaattggatattcacttatggatggatcccaggacaaaccgttcgtcaccaataatatacactggcccaatggtttggctctagatcaacctaactctagactttattggactgatgctaaaaagatgacactagaaagtattaatttagacggaactgatcaaaggatcgttttggaaggaatagtgaaacatccatatgccatcgctgtgtttgaaaacaaactttattggtcagattgggactcccataccattcaaacttgtgataagtttaatggtaaaaatcatcatacactcgtggaagaacataaaaatttaatctatggaatcagtatttttcactatgctctcgaaaagcgtctagtgaatccttgtgagcatgcttcctgtagtgacatttgtttattgaaggctcagtcatatgcttgtgcgtgcccagagaataaagttttggatacggatggtcatacgtgcaaagaagtacaaccaacgcaagcacttgtaggaggaactggacacgtgttggtatcaattaaacatcaatttctaggcaaacacgatgtaacattcctaccagacctggcgaaacacgtaggaagcttagcatttgatagttataaaaacattttgtatgtaagcgatttggaaacaaaaagtatagttgcgcttaacatgaacatcggaattagcaaaactcttgagatcgacggtcttggcaaagttacttcaatggattttgatccaaaaagtaataatttatacatttgcgatacggagaggctagtcgtagaaataattgatatgaataatctagaaagaaaaataattgtccatgacacatttggagaaactcctgaaagcattgcgttggtaccggaagatgggatcatgtttgttagctttaaacaagggaaattgggaaatagccacatcgaccgttttttcatggatggtactggaagaactcacgtcatcgaaaacggtttagtgggcccagttcgtgtagtatacgaccgcagtctttatagaattttctttgccgatctaagtactggggtaatagaatctactagcgcggccggtgacgatagacatcattttcgtactctgactacccatccagtaagtatagcagttttgaaagatgacctattgtggacaaatcttgactccaaggatttatattggtctgaaaaaagatctagcgagtcttatgagaagaaaattacgataggttttaaagaggataacgtcaacatccacttagtgtcagtaacacgtaaacaattagaaatcaatagctgtcgtgttaataataatggatgtagtcatctttgtcttcaatcccataaatcgatagtttgtgcatgtccagctggatgggagctatcggcaaatggttttacatgtaataaaagggtaacctgcgacaataaagagatgctttgtcctcattccaatacttgcgttctgaagagcttaaggtgcaatggttttaaagactgcgcatttggtgaagatgaatgggactgccaaactgtttcccaatgtttacctggccagtataaatgcgacgatggacagtgcatcagtgaagatttggtctgcaatcatagttatgactgtaaagataagtctgatgagtatggatgtgcagataaaaacaaaaaactaggatgtcctcccggacattttacctgtaaaagctccgaatgcatatctgaacgctttgtatgtgatgctttccatgattgcgatgatggatcagatgaactaaactgcgaaaataatatttgtttggaatctcagtttaggtgtgatgtcggaacttgcataccaaaagattgggaatgtgatggagaatatgactgtactgatagttcagatgagcattgttcttcagaagtttgtcagtctaactattttaagtgtgacaacaacagatgtatcgatcctaagcttcagtgcgatgggtttgatgactgcggtgatcactctgatgaaaaattcgagaaatgtttgcatcactcgaaagcaccaaaatgtacattggaagaattcgcgtgtattactaatacttccatttgtcttccaaaatcagctaaatgtaacggaacgtcagaatgtccgaataacgaagacgaaaaggattgttcaaaatgtgaagaagatgaatttgagtgcaagcataagcattatagagaatgtattcctaggtcctggatatgtgatggtacagatgattgcggtgataatagtgatgagagtatggaaacctgttcttcaaaacttaaacctgcggcagataactttgctgttactgactcgtgtctaaccggatatagatgtcatagcggtgcatgcataaatatgacctcagtatgcaataataaccacgattgttttgatggctctgatgaagatggcctctgttcttcatcttgtgtcggtgtgaaaaatccttgcaatcaaatatgcgtaaaaacaccatctggaccaagatgtgaatgtaaacctggatataagttgttaggagatggaaaaacttgtattgatgataatgaatgccaaacggatccaccaatctgtagtcagctatgtcacaataaagaaggaggctattcttgcgattgttacaataatttccttttaagttctaataaaaaatcttgtaaagctcacggaccaagaatgaccatatacttagtgatttacggaaaccaaatccgtcacctaattcctaaatcaaacacaatggctgttctttacaccaatccaatgataaaaatatccagcttggatactctggttaaaccaaaactaatcttcttcagttcttatgaaactcaagctatttataaacttgataccaccaccaacatgatgcactacatcagaaacgtaggtttccctagaacaattgcagttgattggtcaactcaaaacatttattacttcgatactgatgttaatggccggtccattagtgtttgcagttttgaagaaaagtgcgctaagttgataaatattgaatcgcctcgacatgtaactgccttagctgttgattccgtcaataaattgcttttctacgttttgaggaattggtgggtattagaaacaccaagcttcgtaatatacagtgtaaacttggatggatctaatagacaagaaatagtaaaaacaacaacgggcaatgttgaagatataactttcgatattaacaagaaacttttatactatactaacaaacaagatgaaagtatacacgaagtaagctacaaaggaggaccggttaaaactgtattttcaaatatctctcaaccagaaggacttaaattttttgagaaccaattatactatactgttgcaactggttatatagtcagttgtaagctatatggagacagatcctgcaatcccagatataaattacacacgtttgccagtggtcaatttgttattgagcaggaatcgcttcagcctaaagtagaaaatgtttgtactggacacaaatgtccatacttatgtgtaccagcagaatcaggatatagatgtctctgtcataacgggaaagttagtaatcattcagaaatttgtggtgaaaacgatgataatcagtcaggaaataatcacaaatttgctgtacatactacaccaatacagactgcatccgataaacattcaggagcagtggcctcagcaatattaattccactactattagtattccttggagcagtattttattatttgctaaaaaggagaggtgatactggattaaatataagcatgcgattttataacccactctacggaaaacctgtccgtgaagaccaaaaacaaatccttaaaccaggacaacacgagtacacaaatccgataattgtggccgaagaacatgaggaccacgcgaaagatgctagcagaatgctaaacgatagttgtgtttgttaa

SEQ ID NO: 3 - DNA, 236 bp, Diabrotica virgifera
tgttaattttgttctttgtgctttcaacgttattaaatgcagtcgtttcaacgaataataatgattgccctccacatcagtttagatgcacaaattcaaaatgtatagactttcaacaaagatgtgatggttccgacaattgtggagatggatcggatgaactggattgtgatcataaatgtcatgaacattttttcaattgtcgaaatggaagatgtataagcgaagcattcctg

SEQ ID NO: 4 - DNA, 155 bp, Diabrotica virgifera
gctttcaacgttattaaatgcagtcgtttcaacgaataataatgattgccctccacatcagtttagatgcacaaattcaaaatgtatagactttcaacaaagatgtgatggttccgacaattgtggagatggatcggatgaactggattgtgatc

SEQ ID NO: 5 - DNA, 250 bp, Diabrotica virgifera
gtcaccaataatatacactggcccaatggtttggctctagatcaacctaactctagactttattggactgatgctaaaaagatgacactagaaagtattaatttagacggaactgatcaaaggatcgttttggaaggaatagtgaaacatccatatgccatcgctgtgtttgaaaacaaactttattggtcagattgggactcccataccattcaaacttgtgataagtttaatggtaaaaatcatcata

SEQ ID NO: 6 - DNA, 155 bp, Diabrotica virgifera
agaggataacgtcaacatccacttagtgtcagtaacacgtaaacaattagaaatcaatagctgtcgtgttaataataatggatgtagtcatctttgtcttcaatcccataaatcgatagtttgtgcatgtccagctggatgggagctatcggcaa

SEQ ID NO: 7 - DNA, 155 bp, Diabrotica virgifera
aatattaattccactactattagtattccttggagcagtattttattatttgctaaaaaggagaggtgatactggattaaatataagcatgcgattttataacccactctacggaaaacctgtccgtgaagaccaaaaacaaatccttaaaccag

SEQ ID NO: 8 - DNA, 400 bp, Diabrotica virgifera
cctgtgtgatggtgaaaatgattgtaataactttttggatgaaaaagactgtaagggtcaaacggtgctaactctcgaaactgatggccattgcgaagatggtcattggaagtgtgccgataaattgtgtattccacttgacatggtatgtaatggcgcacctgaatgtttggatggatcagatgaaactattggatgcagtaacaagatcgtttgtgatggatttaaatgtaaaaatggccattgcataccaactgaatgggcttgcgacggtcttgatgattgtggtgataaaactgatgaacaagattgcgcaaaccacgtaccacttgatcaatgcactttggataaaagaaaattcttgtgtagtaacaataaaacttgcatagatcttcactcg

SEQ ID NO: 9 - DNA, 400 bp, Diabrotica virgifera
gtctgtgataataagttagattgtcccgattattctgatgaaggaaaacagtgcaattcgtctgcaatatcatgtaacaataacaaatgttctcatacatgtatatcacttccaacgggtccaaaatgtctgtgtccgaatggttaccatacgcttgatgattcgaattgtttggatattaatgaatgtacaacttatggaatttgtgaccaaaaatgtagaaatcttcctggatcatacgaatgctactgtgatgataagtacacactccaagccgataaaaaaacatgtaaagcaactggcggaagcggaataatgatctttagttccaagcaggaaattcgagctttaaccttagattctttagattattttacagtggctaaagatttaaatcaag

SEQ ID NO: 10 - DNA, 368 bp, Diabrotica virgifera
tagtgggaatagcatacgatggacatcatatttactggacagacgtatttactggacatgaaactatatcgaggtctattgaagatggatcggaaagggaggtattggtaacatctggactcagtctaccagaggatctagcgtatgattggttaactggtaatatttatttcaccgatgctctcaaacaacatgttggagtgtgttccaatgatggtcaccattgtacagttctagtcaacaaagatattcgaaaaccacgtgggattgttgttaatgtggaagctggagatatgtattggtctgattggggtgtaccagcagcaattggatattcacttatggatggatcccaggacaaaccgttc

SEQ ID NO: 11 - DNA, 475 bp, Diabrotica virgifera
cactcgtggaagaacataaaaatttaatctatggaatcagtatttttcactatgctctcgaaaagcgtctagtgaatccttgtgagcatgcttcctgtagtgacatttgtttattgaaggctcagtcatatgcttgtgcgtgcccagagaataaagttttggatacggatggtcatacgtgcaaagaagtacaaccaacgcaagcacttgtaggaggaactggacacgtgttggtatcaattaaacatcaatttctaggcaaacacgatgtaacattcctaccagacctggcgaaacacgtaggaagcttagcatttgatagttataaaaacattttgtatgtaagcgatttggaaacaaaaagtatagttgcgcttaacatgaacatcggaattagcaaaactcttgagatcgacggtcttggcaaagttacttcaatggattttgatccaaaaagtaataatttatacatttg

SEQ ID NO: 12 - DNA, 474 bp, Diabrotica virgifera
cgatacggagaggctagtcgtagaaataattgatatgaataatctagaaagaaaaataattgtccatgacacatttggagaaactcctgaaagcattgcgttggtaccggaagatgggatcatgtttgttagctttaaacaagggaaattgggaaatagccacatcgaccgttttttcatggatggtactggaagaactcacgtcatcgaaaacggtttagtgggcccagttcgtgtagtatacgaccgcagtctttatagaattttctttgccgatctaagtactggggtaatagaatctactagcgcggccggtgacgatagacatcattttcgtactctgactacccatccagtaagtatagcagttttgaaagatgacctattgtggacaaatcttgactccaaggatttatattggtctgaaaaaagatctagcgagtcttatgagaagaaaattacgataggttttaa

SEQ ID NO: 13 - DNA, 500 bp, Diabrotica virgifera
atggttttacatgtaataaaagggtaacctgcgacaataaagagatgctttgtcctcattccaatacttgcgttctgaagagcttaaggtgcaatggttttaaagactgcgcatttggtgaagatgaatgggactgccaaactgtttcccaatgtttacctggccagtataaatgcgacgatggacagtgcatcagtgaagatttggtctgcaatcatagttatgactgtaaagataagtctgatgagtatggatgtgcagataaaaacaaaaaactaggatgtcctcccggacattttacctgtaaaagctccgaatgcatatctgaacgctttgtatgtgatgctttccatgattgcgatgatggatcagatgaactaaactgcgaaaataatatttgtttggaatctcagtttaggtgtgatgtcggaacttgcataccaaaagattgggaatgtgatggagaatatgactgtactgatagttcagatgagcattgt

SEQ ID NO: 14 - DNA, 500 bp, Diabrotica virgifera
tcttcagaagtttgtcagtctaactattttaagtgtgacaacaacagatgtatcgatcctaagcttcagtgcgatgggtttgatgactgcggtgatcactctgatgaaaaattcgagaaatgtttgcatcactcgaaagcaccaaaatgtacattggaagaattcgcgtgtattactaatacttccatttgtcttccaaaatcagctaaatgtaacggaacgtcagaatgtccgaataacgaagacgaaaaggattgttcaaaatgtgaagaagatgaatttgagtgcaagcataagcattatagagaatgtattcctaggtcctggatatgtgatggtacagatgattgcggtgataatagtgatgagagtatggaaacctgttcttcaaaacttaaacctgcggcagataactttgctgttactgactcgtgtctaaccggatatagatgtcatagcggtgcatgcataaatatgacctcagtatgcaataataacca

SEQ ID NO: 15 - DNA, 251 bp, Diabrotica virgifera
cgattgttttgatggctctgatgaagatggcctctgttcttcatcttgtgtcggtgtgaaaaatccttgcaatcaaatatgcgtaaaaacaccatctggaccaagatgtgaatgtaaacctggatataagttgttaggagatggaaaaacttgtattgatgataatgaatgccaaacggatccaccaatctgtagtcagctatgtcacaataaagaaggaggctattcttgcgattgttacaataatttcc

SEQ ID NO: 16 - DNA, 140 bp, Diabrotica virgifera
aaagtatacacgaagtaagctacaaaggaggaccggttaaaactgtattttcaaatatctctcaaccagaaggacttaaattttttgagaaccaattatactatactgttgcaactggttatatagtcagttgtaagcta

SEQ ID NO: 17 - DNA, 500 bp, Diabrotica virgifera
tatggagacagatcctgcaatcccagatataaattacacacgtttgccagtggtcaatttgttattgagcaggaatcgcttcagcctaaagtagaaaatgtttgtactggacacaaatgtccatacttatgtgtaccagcagaatcaggatatagatgtctctgtcataacgggaaagttagtaatcattcagaaatttgtggtgaaaacgatgataatcagtcaggaaataatcacaaatttgctgtacatactacaccaatacagactgcatccgataaacattcaggagcagtggcctcagcaatattaattccactactattagtattccttggagcagtattttattatttgctaaaaaggagaggtgatactggattaaatataagcatgcgattttataacccactctacggaaaacctgtccgtgaagaccaaaaacaaatccttaaaccaggacaacacgagtacacaaatccgataattgtggccgaaga

SEQ ID NO: 18 - DNA, 488 bp, Diabrotica virgifera
tcttgtaaagctcacggaccaagaatgaccatatacttagtgatttacggaaaccaaatccgtcacctaattcctaaatcaaacacaatggctgttctttacaccaatccaatgataaaaatatccagcttggatactctggttaaaccaaaactaatcttcttcagttcttatgaaactcaagctatttataaacttgataccaccaccaacatgatgcactacatcagaaacgtaggtttccctagaacaattgcagttgattggtcaactcaaaacatttattacttcgatactgatgttaatggccggtccattagtgtttgcagttttgaagaaaagtgcgctaagttgataaatattgaatcgcctcgacatgtaactgccttagctgttgattccgtcaataaattgcttttctacgttttgaggaattggtgggtattagaaacaccaagcttcgtaatatacagtgtaaacttggatgg

SEQ ID NO: 19 - DNA, 5313 bp, Diabrotica undecimpunctata
atgttaattttgttttttgtgctttccacgttattaaatgcagtcgtttcaacgaataacaatgattgtcttcaacatcagttcagatgcacaaattcaaaatgtatagattttcagcaaagatgtgatggttccgataattgtggggatggatcggatgaactggagtgtgatcataaatgtcatgaacattttttcgattgtcgaaatgggagatgtataagcgaagcattcgtatgtgatggtgaaaatgattgtaataactttttggatgaaaaagactgtaaggataaaacgctaactctcgaaactgatcagcattgtgaagatggtcattggaagtgtactgatagattgtgtattccaaatgactgggtgtgtaatggcgtacctgaatgtttggatggatcagatgaaactattggatgtagcagcaagatcgattgtgatgggtttaaatgtaaaaatggtcattgtataccaaatgaatggaattgcgatggtgttgacgattgcggcgataaaactgatgaacaagattgtgaagaccacgtgccacttgatcaatgcactttggataaaagaaaattcttgtgtagcaacaataaaacttgcatcgatcttcactcagtctgtgataataagtttgattgtcccgattattctgatgaaggaaaactttgcaattcgtctacagtattatgtaagaataacaaatgttcgcacacatgtatcccacttccaacgggtacaaaatgtctgtgtccgaatggataccatacgattgatgattcgaaatgtttggatattaatgaatgtacaatttatggtatatgcgaccaaaaatgtcgaaatcttcctggatcatacgaatgctactgtgatgataaatacaaactccaagctgataaaagaacttgtaaagcaattggaggaagcggaataatgatctttagttccaagcaggaaattagagctttaaccttggattctttagattattttacagtggctaaagatttaaaacaagtagtcggaatagcatacgatggaaatcatatttattggacagacgtatttactggacatgaaactatatcgaggtctattgaagatggatcacagagagaggtattggtaacatctggattaagtttaccagaggatctagcatttgattggttaactcataatatttattttaccgatgctctgaaacaacatgttggagtatgttccaatgatggtaaccattgtacagtactagtcaacaaagatattcgaaaaccacgtgggattgttgttaatgtggaagctggagatatgtattggtctgattggggagtaccagcagcaattggatattcacttatggatggttcccatgacagaccgtttgtcaccaataatatacactggcccaatggtttggctctagatcaacctaactctagactttattggactgatgccaaaaagatgacattagaaagtattaatttagacggaactgatcaaaggattgttttggaaggaatcgtgaaacatccctatgccatcgctgtgtttgaaaacaaattgtattggtcagattgggactcccatagcattcaaacttgtgataagttcgatggtaaaaatcaccatacactcgtagaagaacataaaaatctaatctatggaatcagtatctttcactatgctctcgaaaagcgtctagtgaatccttgtgaccatacttcctgtagtgatatttgtctattgaaggctcagtcatatgcttgtgcgtgcccggaaaataaaattttagatacggatggtcatacgtgcaaagaaatacaaccaacgcaagcacttgttggaggaactggacatgttttagtgtcaatcaaacatcaatttctaggcaaacacgacgtaacattcctaccagacctggtgaaacacgtaggaagcttagcgtatgacagttataaaaaagttttgtatgttagcgatttggaaacaaaaagtatagttgagcttaacatggttacaggcgttagcaaaactcttgatatcagcggtattggcagagttacttcaatggattttgatccaaaaagtaataatttatacatttgcgatacggaaaggctggttgtagaaattattgatatgaatagtcaagaaagaaaaataattgttcacgacacttttggagaaagtcctgaaagcattgctttggtaccggaagatggtatcatgtttgtaagttttaaacaaggaaaatcaggaaatagtcacatcgatcgtttattcatggatggtaccggaagaactcacgtcatcgaaagcggattagtgggcccagtccatgtagtgtatgaccacagtctttatagaattttctttgcggatctaagtactggtgttatcgaatctacgagtgtgaccggtgacgatagacatcattttcgtactctgactactcatccagtaagtttagcggttttgaaagatgatatattgtggacaaatattgactccaaggatttatattggtctgaaaaaagatctagtgagtcttatgagaagaaaattactttaggttttaaagaagataacgttaatattcacttagtatcagtgacacataaacaattagaaattaatggttgccgtgttaataataatggatgcagtcatctttgtcttcaatcccacaaatcaataatttgtgcatgtccagctggatgggagctatcggcaaatggttttacatgtaataaaaggttaacctgcgacaataaagagatgctttgtcctcattccaatacttgcattctaaagagcttaaggtgcaatggttttaaagactgcgcatttggtgaagatgaatgggattgtcaagctgcttccgaatgtttacctggtcagtataaatgcgacgatggacagtgcatcagtgaagatttggtctgcaatcatagttatgactgtaaagataagtcggacgagtatggatgtgcagataaaaagaagaaactagggtgtcctcccggtcattttacctgtaagagctctgaatgtatatcagaacgatttttatgtgatggttatcatgattgcgatgatggatcagatgaatttaattgcgagaataatatttgtttggaatctcagttcaggtgtgatgtcggaacttgcataccaaaagattgggaatgcgatggagaatatgactgtactgataattcagatgagcactgttcttcagaaggttgtcgctccgactatttcaagtgtgataacaacagatgtatcgatcctaaacttcattgcgatgggtttgatgactgcggtgaccactctgatgaaaaattcgagcaatgtttgcatcactcgaaagcaccaaaatgtacattggaggaattcgcatgcaccactaatacttccatttgtcttccacaatcagctaaatgtaacggaacatcagaatgcccgaataaagaagacgaaaaggattgttcaaaatgcgaagaagatgaatttgagtgtaagaataagcattacagagaatgtattcctagatcctggttatgtgatggcgcagatgattgcggtgataatagtgatgagaatatggaaacatgttcttcaaaactcaaaactctgggaaataatactgctgttgctgatccgtgtctaaccggatatagatgtcgcagcggtgcatgcataaatatgacttcagtatgcaataataaacacgattgttatgatggctctgatgaagatggactctgttcttcatcttgtgtcggtgtaaaaaatccctgcaatcaaatatgcgtaaaaacaccatctggaccaagatgtgaatgtagactgggatataaattgctaggagacggaaaaacgtgtatcgatgataatgaatgccaaacggatcccccaatctgtagtcagttatgtcacaataaagaaggaggttattcttgtgattgttacaataatttccttttaagttctaataaaaaatcttgtaaggctcacggaccacgaatgaccatatacttagtgatttacggaaacgaaatccgtcaactaattcctaaatcaaatacaatggctgttgtttacaccaatccaatgataaaaatctccagcttggatactctgattaaaccaaaactaatcttctttggttcttatgaaactcaagctatttataaactggataccaccacaaacatgatgcactacatcagaaacgtaggttttcctagaaaaattgcagttgattggtccactcaaaacatttattacttcgatactgattataatggccggtccattagtgtttgcagttttgaagaaaagtgtgctaagttaataaatattgaatcgcctcgacatgtatctgccttagctgttgattccgttaataaaaaacttttctacgttttgaggaattggtgggtattagaaacaccaagcttcgtaatatacagtgtaaacttggatggatctaatagacaagaaatagtaaaaacaacaacaggtaatgttgaagatataactttcgatattaacaagaaacttttatactacactaataaacaagatgaaagtatatatgaagtaaactacaaaggaggacctgttaaaactgtattttcaaacatctctcaaccagaaggtcttaaatttttcgaaaatcagttatactatactgttgcaactggttatatagtcagttgtaagctatatggagacaaatcttgtcatcccagatataaattacacacttttgccagtggtcaatttattattgagcaggaatcgcttcagcctaaaaccgaaaatgtttgtactggacacaaatgtccatacttatgtgtaccagcagaaacaggttatagatgtctttgccatgacgggaaagttagtaatcattcagaaatttgtggcgaaaatgatgataatcagtcaggaaataatcacaagtttgctgtacacactacaccattacaaacggcatccgataaacactctggagcagtggcctcagcaatattaattccaatactcttggtattccttggagcagtattttattatgtgctaaaaaagaaaggtgatactggcttaaatataagcatgagattttataacccactttacggaaaacctgtcgaagaccaaaaaccaatccttcagccaggacaacacgagtacacaaatccgatcattgtggcagaagaaagaagtcaagaggaccatgcgaaagatgctagcagaatgctaaacgatagttgtgtttgttaa

SEQ ID NO: 20 - DNA, 5730 bp, Diabrotica undecimpunctata
tttggccagttcatcagttaaaactgtgagtgctacattttttgaatatctcgtaaagtatgttaattttgttttttgtgctttccacgttattaaatgcagtcgtttcaacgaataacaatgattgtcttcaacatcagttcagatgcacaaattcaaaatgtatagattttcagcaaagatgtgatggttccgataattgtggggatggatcggatgaactggagtgtgatcataaatgtcatgaacattttttcgattgtcgaaatgggagatgtataagcgaagcattcgtatgtgatggtgaaaatgattgtaataactttttggatgaaaaagactgtaaggataaaacgctaactctcgaaactgatcagcattgtgaagatggtcattggaagtgtactgatagattgtgtattccaaatgactgggtgtgtaatggcgtacctgaatgtttggatggatcagatgaaactattggatgtagcagcaagatcgattgtgatgggtttaaatgtaaaaatggtcattgtataccaaatgaatggaattgcgatggtgttgacgattgcggcgataaaactgatgaacaagattgtgaagaccacgtgccacttgatcaatgcactttggataaaagaaaattcttgtgtagcaacaataaaacttgcatcgatcttcactcagtctgtgataataagtttgattgtcccgattattctgatgaaggaaaactttgcaattcgtctacagtattatgtaagaataacaaatgttcgcacacatgtatcccacttccaacgggtacaaaatgtctgtgtccgaatggataccatacgattgatgattcgaaatgtttggatattaatgaatgtacaatttatggtatatgcgaccaaaaatgtcgaaatcttcctggatcatacgaatgctactgtgatgataaatacaaactccaagctgataaaagaacttgtaaagcaattggaggaagcggaataatgatctttagttccaagcaggaaattagagctttaaccttggattctttagattattttacagtggctaaagatttaaaacaagtagtcggaatagcatacgatggaaatcatatttattggacagacgtatttactggacatgaaactatatcgaggtctattgaagatggatcacagagagaggtattggtaacatctggattaagtttaccagaggatctagcatttgattggttaactcataatatttattttaccgatgctctgaaacaacatgttggagtatgttccaatgatggtaaccattgtacagtactagtcaacaaagatattcgaaaaccacgtgggattgttgttaatgtggaagctggagatatgtattggtctgattggggagtaccagcagcaattggatattcacttatggatggttcccatgacagaccgtttgtcaccaataatatacactggcccaatggtttggctctagatcaacctaactctagactttattggactgatgccaaaaagatgacattagaaagtattaatttagacggaactgatcaaaggattgttttggaaggaatcgtgaaacatccctatgccatcgctgtgtttgaaaacaaattgtattggtcagattgggactcccatagcattcaaacttgtgataagttcgatggtaaaaatcaccatacactcgtagaagaacataaaaatctaatctatggaatcagtatctttcactatgctctcgaaaagcgtctagtgaatccttgtgaccatacttcctgtagtgatatttgtctattgaaggctcagtcatatgcttgtgcgtgcccggaaaataaaattttagatacggatggtcatacgtgcaaagaaatacaaccaacgcaagcacttgttggaggaactggacatgttttagtgtcaatcaaacatcaatttctaggcaaacacgacgtaacattcctaccagacctggtgaaacacgtaggaagcttagcgtatgacagttataaaaaagttttgtatgttagcgatttggaaacaaaaagtatagttgagcttaacatggttacaggcgttagcaaaactcttgatatcagcggtattggcagagttacttcaatggattttgatccaaaaagtaataatttatacatttgcgatacggaaaggctggttgtagaaattattgatatgaatagtcaagaaagaaaaataattgttcacgacacttttggagaaagtcctgaaagcattgctttggtaccggaagatggtatcatgtttgtaagttttaaacaaggaaaatcaggaaatagtcacatcgatcgtttattcatggatggtaccggaagaactcacgtcatcgaaagcggattagtgggcccagtccatgtagtgtatgaccacagtctttatagaattttctttgcggatctaagtactggtgttatcgaatctacgagtgtgaccggtgacgatagacatcattttcgtactctgactactcatccagtaagtttagcggttttgaaagatgatatattgtggacaaatattgactccaaggatttatattggtctgaaaaaagatctagtgagtcttatgagaagaaaattactttaggttttaaagaagataacgttaatattcacttagtatcagtgacacataaacaattagaaattaatggttgccgtgttaataataatggatgcagtcatctttgtcttcaatcccacaaatcaataatttgtgcatgtccagctggatgggagctatcggcaaatggttttacatgtaataaaaggttaacctgcgacaataaagagatgctttgtcctcattccaatacttgcattctaaagagcttaaggtgcaatggttttaaagactgcgcatttggtgaagatgaatgggattgtcaagctgcttccgaatgtttacctggtcagtataaatgcgacgatggacagtgcatcagtgaagatttggtctgcaatcatagttatgactgtaaagataagtcggacgagtatggatgtgcagataaaaagaagaaactagggtgtcctcccggtcattttacctgtaagagctctgaatgtatatcagaacgatttttatgtgatggttatcatgattgcgatgatggatcagatgaatttaattgcgagaataatatttgtttggaatctcagttcaggtgtgatgtcggaacttgcataccaaaagattgggaatgcgatggagaatatgactgtactgataattcagatgagcactgttcttcagaaggttgtcgctccgactatttcaagtgtgataacaacagatgtatcgatcctaaacttcattgcgatgggtttgatgactgcggtgaccactctgatgaaaaattcgagcaatgtttgcatcactcgaaagcaccaaaatgtacattggaggaattcgcatgcaccactaatacttccatttgtcttccacaatcagctaaatgtaacggaacatcagaatgcccgaataaagaagacgaaaaggattgttcaaaatgcgaagaagatgaatttgagtgtaagaataagcattacagagaatgtattcctagatcctggttatgtgatggcgcagatgattgcggtgataatagtgatgagaatatggaaacatgttcttcaaaactcaaaactctgggaaataatactgctgttgctgatccgtgtctaaccggatatagatgtcgcagcggtgcatgcataaatatgacttcagtatgcaataataaacacgattgttatgatggctctgatgaagatggactctgttcttcatcttgtgtcggtgtaaaaaatccctgcaatcaaatatgcgtaaaaacaccatctggaccaagatgtgaatgtagactgggatataaattgctaggagacggaaaaacgtgtatcgatgataatgaatgccaaacggatcccccaatctgtagtcagttatgtcacaataaagaaggaggttattcttgtgattgttacaataatttccttttaagttctaataaaaaatcttgtaaggctcacggaccacgaatgaccatatacttagtgatttacggaaacgaaatccgtcaactaattcctaaatcaaatacaatggctgttgtttacaccaatccaatgataaaaatctccagcttggatactctgattaaaccaaaactaatcttctttggttcttatgaaactcaagctatttataaactggataccaccacaaacatgatgcactacatcagaaacgtaggttttcctagaaaaattgcagttgattggtccactcaaaacatttattacttcgatactgattataatggccggtccattagtgtttgcagttttgaagaaaagtgtgctaagttaataaatattgaatcgcctcgacatgtatctgccttagctgttgattccgttaataaaaaacttttctacgttttgaggaattggtgggtattagaaacaccaagcttcgtaatatacagtgtaaacttggatggatctaatagacaagaaatagtaaaaacaacaacaggtaatgttgaagatataactttcgatattaacaagaaacttttatactacactaataaacaagatgaaagtatatatgaagtaaactacaaaggaggacctgttaaaactgtattttcaaacatctctcaaccagaaggtcttaaatttttcgaaaatcagttatactatactgttgcaactggttatatagtcagttgtaagctatatggagacaaatcttgtcatcccagatataaattacacacttttgccagtggtcaatttattattgagcaggaatcgcttcagcctaaaaccgaaaatgtttgtactggacacaaatgtccatacttatgtgtaccagcagaaacaggttatagatgtctttgccatgacgggaaagttagtaatcattcagaaatttgtggcgaaaatgatgataatcagtcaggaaataatcacaagtttgctgtacacactacaccattacaaacggcatccgataaacactctggagcagtggcctcagcaatattaattccaatactcttggtattccttggagcagtattttattatgtgctaaaaaagaaaggtgatactggcttaaatataagcatgagattttataacccactttacggaaaacctgtcgaagaccaaaaaccaatccttcagccaggacaacacgagtacacaaatccgatcattgtggcagaagaaagaagtcaagaggaccatgcgaaagatgctagcagaatgctaaacgatagttgtgtttgttaactttgtatctttttgttacgtcattctttgttttatgttttatataatcttataaacgttgttttaatcttttgaagtgtattaaaagtaaattaattcttacacttcacaaatattaaattcgttgaaaattgaattgttgaacataacaatctatattatacctacatcaaaatagatacaaatgaatatttattataacgctatatcgagcagtagagtttaaccttaataccaataaataggtgtaacgggtgcatttgacaatatcaaattatttattatagaataggctaaatgcataatactttatatttttataattatattttattaaaattttatgaactttaaaaaa

SEQ ID NO: 21 - DNA, 5295 bp, Leptinotarsa decemlineata
atgtatgttcttttggttctgggagctgtagcatcctcatcagctttcttggaatcgctaatctccctgaacgactgccctccggctcagtttgcttgcaggaatggaaaatgcgtggataaaactttgagatgcaatggattcaacaactgtttggatggatctgatgaaatggattgtgaattgtatttatgcaaagagccgagatattatcgatgtaagaataaaagatgtatcagcaaattatttgtttgcgatggagaaaatgattgcgaggatttttctgatgaagtcgaatgtgagaactttaagatgtcagatcacgtgaacacaacatgcgaaaaaggccactggcagtgcacagataaactgtgcataccaaatgaatgggtgtgcaatggagaatcagattgtttagatggatcagatgaaggaatagggtgcagctcgaaaatagagtgcgatggattcaaatgtaaaaatggtcactgtattcccaacgaatggatatgcgacaacaacaatgactgtcacgataatagtgacgaggaggattgtgaaaatcacgttcctatcaacaagtgcacactggataatcgaaaatttctttgctctaacaataaaacctgcattgacctagttcttacgtgcgatggccatcctaactgcccggatggatctgacgagggacccctttgcaaatcggcagtttcttgccaaaatcacgggtgctctcacgaatgtttccctttgcctacaggaccgttatgtttatgccctcctggatatcttactgagaatgataaacgttgccaggatatcaacgagtgcgaacagtttgatatttgtgatcaaaagtgcaggaatctgccgggatcctatgaatgttattgcgatcataaatatttgcttaaagaagataaaagaacttgcaaagctgtgggtggagaagctttaatggtatttagttccaaatccgaaataagagcatatgccttggaatccgagttatattttccgatagtacaaaagttgaagcaagtagtcggcgttgattatgacggccaccatatctactggacggatatttttgcagagcatgagagtatcgcacgaaccactgaggatggatcaaaacgagagattctgattacttccggacttggtttaccagaagatttagctgttgattggctcacaggaaatatttatttcacggatgctgaaaaggcgcatataggcgtttgtaacagtcatggaactcactgtaccgttttggtgaacaaagatgtcaatagacccagaggactggtactgaatgttgaagagggagacatgtactggtctgattggggaaaaccgtccaaaattgctcattctctgatggatggttcaaatgacagagcattcatatctacagatattcattggcctaatgggctagccctggatcaatctaaccaaaggctttattggactgatgctaaaaaaatgaccctggaaagcattcgattggacggaacggatagaaggattgtgttggaaggggtcgtgaaacatccttatgccattgcggtgttcgaaaataaattgtactggtcagattggtcaactcgttccatccaaacttgtgacaaatttactggcaaagatcatcacactctggttaaagaagataagtatatatatggaatcagcatattccattcagctctccacagaagacttgataatccttgtgcattgtcctactgtagcgatatttgcttgctgaagggaaatacctacagctgtgcctgccctgagaataaacttctgggaagtgacaagcattcatgtaaagatattggacccacagaaacgttgatcgctgggactcaagatagtttagttcatatagagcacaaatttttgggaaaacatgatgtcacgtatctgcccagtatagttaaaaaaattggttgcttggcttatgatagtattaataactcactactgatcagcgacttggagttgaaaaaaatcgttaacttggatttggatgatggaatcaataaagttcttgaaattgatggattaggaagtataacagcaatggattatgatgctaaaggaaataacctctatgtatgtgatagggagaaacgaaccttggaagtaatcagtctcaatactttgtcaaaaaaaattcttctgaacttcatgaacggggaaattccagaagctgtggctgtggttccggatgaaggggtgatgtttgtcagtttgagagaagcagaaggtacattttgtcatttggatcgcttctatatggacggaacgggaaggacacacaccttagaagatcatctgataggccctatatcactacgctatgaccatgatttgaacagagttttctttgctgatgctggtactggattgatagaatcaactagtgttgaaggagacgatcgacatgatttccgaaggctaacaacccacccctctagcatcacaactcttaaaaatgatctattctgggtgaacgaaaactccaagcgtttgtattgggcagagaagaaaagcatttcaatgtataacagaaaaattaccctagatctctccagagaaccagagaaactccatctaatatcagtaacccccagaaaaaatgtgttgagcgcttgttggctcaacaacaatggatgcagtcacctttgcctcatgtcgcacaagacaacggtttgcgcttgtccaactggctacgaactatccgacgaccacaggacttgcatccgacgcgtgcattgcgactcttctgaattcttttgccctcagtctaacgtctgcgtcatgaagagcttaagatgcaattcacatcaggactgtgcatttggagaagatgaactgaactgtgacataaacagatgcacaaccgggttcttccgttgcgataatggcgattgcatcaaagaacagctagtgtgcgaccatcattacgactgcagggataaatctgacgaagataattgcgctgagaagaagaaacacgtgggatgtccgccaaagcactttagatgcgggaatggagactgcatttcagatagattcatatgcgatggttataaagattgtgaggatagctcggatgaaaagggctgcgagaagatgttctgttcggataccgaatttagatgcgattctggaacatgtattcctagtagctgggagtgcgaccacgaatatgattgctcagattcctccgacgaacatcccggatgtgcttccatcacctgttctgcaaccatgttcacttgtggaaatggcaaatgcctcgataaaagtcttgtctgcgacaaaagcgatgactgtggcgataattcagacgaaacgtcctgcttcaaacgcccctcctcttgccttccgcaagaattttcttgtccttcgaatacctctatctgcgtccctatgtcagccaagtgcaatggatccgtcgagtgtcctaagggagaagacgaggaagaatgtggcgactgcatgccggatgagttccgctgtctcaacaagcaatgcattgcggcacaatggatgtgcgatggcatcaacgactgtgatgacggcagtgatgaaactgctgaaggttgctcgcagaagaataaaaccacgggggagatgtccgtggttcatactgcctgtgaaaatggattcaggtgtaaaaatggagattgcttggatatgaaactggtgtgtaatggaaatcacgattgttacgatggttctgatgaggatggactgtgttcaacttcctgtgaaggatcagccaatcgatgttctcaaatatgcaataaaactccaatgggaccgtcttgcgagtgtagatctgggtttatattgatgggcaatggggtcagctgcatggatttgaatgaatgccagaatcatccaccagtgtgcagtcaaatttgccacaatcaggacggcggtttcaaatgcgattgttatgatggctttttactgagatccgacaagaaatcttgcaaagcagaaggaaatccgatgtcgctcattttcagtgaatatgggcaaataagggaactctcgcaattgactaatatcttgtctgttgtatttgccactcctgcaccaaaaataactggcctagacgtacttgtcaatccaagaaccatctatttcagcatggaggaaacttccacgattcacaaaatcgatatggcatcaaaaacgagacatttcataaggaatattggacaacctcaggacattgctgttgattggtctactcacaacatctattactataacacggacaccaactcgaaatctatcagtatttgtagtttcgaagaaaagtgcgcgaagttgattgatgttgacatgcacagacaagtggcaggattggttgtcgactctgtcaacaaatttttattttatgctttgaacagttggtacgtgttcaattcccccagttacgttatctacaggtgcaacttggatggaactgagaagacggaaataatgaaaactacagatgggtttgtatccgacatcacttttgaccacaacagtaggatattgtactacatggatatgtacttgggtcaaataaataagataacctatgatggtagtttcaaaactccaatttattccaatatcacccgatcctcagggcttaagttcttcgagaaccgattatactattctacgaatgggggatttgtttcagtttgcaggttatacggatttctgagatgtgatagtttcaggcttcacaatgatgcaatagatttcttcactattctacaagagacgcttcagccgagtgtgggtaatccttgcaagaaccacaattgctccaacttatgcgttccagctcagtttggatataaatgtctctgccaggatggaacgcttctatctggaccaggaagttgtccaattaatgagaataccccagagtccgacaaaaaatatactgttcactcggtggcgatgacacaggctggtcctgaggagggaagttcgggtactgtagctgttgccatcacgatacctcttctggtgatattatttgctttgggagccatttactttatcaagaaaaagcatgcaggagctttgaatgtcaggatgagattttatactcctcatttcggaaggaccgttcaagatgaaaatcctattctaaagcctggtcaacatgaatacacaaaccctgttcattttaataaagaagataatgaattaactctagaaacagcacctatcaaactgaatgatgcctcgaatgtg

SEQ ID NO: 22 - DNA, 5690 bp, Leptinotarsa decemlineata
gctctcgtagttagcccttctgtgttgtgaaaattgtttcattttatcagtattcatccttagaaattgatatttttttcatatggttttcaaccgagattgattactaaatatttgagaatgtatgttcttttggttctgggagctgtagcatcctcatcagctttcttggaatcgctaatctccctgaacgactgccctccggctcagtttgcttgcaggaatggaaaatgcgtggataaaactttgagatgcaatggattcaacaactgtttggatggatctgatgaaatggattgtgaattgtatttatgcaaagagccgagatattatcgatgtaagaataaaagatgtatcagcaaattatttgtttgcgatggagaaaatgattgcgaggatttttctgatgaagtcgaatgtgagaactttaagatgtcagatcacgtgaacacaacatgcgaaaaaggccactggcagtgcacagataaactgtgcataccaaatgaatgggtgtgcaatggagaatcagattgtttagatggatcagatgaaggaatagggtgcagctcgaaaatagagtgcgatggattcaaatgtaaaaatggtcactgtattcccaacgaatggatatgcgacaacaacaatgactgtcacgataatagtgacgaggaggattgtgaaaatcacgttcctatcaacaagtgcacactggataatcgaaaatttctttgctctaacaataaaacctgcattgacctagttcttacgtgcgatggccatcctaactgcccggatggatctgacgagggacccctttgcaaatcggcagtttcttgccaaaatcacgggtgctctcacgaatgtttccctttgcctacaggaccgttatgtttatgccctcctggatatcttactgagaatgataaacgttgccaggatatcaacgagtgcgaacagtttgatatttgtgatcaaaagtgcaggaatctgccgggatcctatgaatgttattgcgatcataaatatttgcttaaagaagataaaagaacttgcaaagctgtgggtggagaagctttaatggtatttagttccaaatccgaaataagagcatatgccttggaatccgagttatattttccgatagtacaaaagttgaagcaagtagtcggcgttgattatgacggccaccatatctactggacggatatttttgcagagcatgagagtatcgcacgaaccactgaggatggatcaaaacgagagattctgattacttccggacttggtttaccagaagatttagctgttgattggctcacaggaaatatttatttcacggatgctgaaaaggcgcatataggcgtttgtaacagtcatggaactcactgtaccgttttggtgaacaaagatgtcaatagacccagaggactggtactgaatgttgaagagggagacatgtactggtctgattggggaaaaccgtccaaaattgctcattctctgatggatggttcaaatgacagagcattcatatctacagatattcattggcctaatgggctagccctggatcaatctaaccaaaggctttattggactgatgctaaaaaaatgaccctggaaagcattcgattggacggaacggatagaaggattgtgttggaaggggtcgtgaaacatccttatgccattgcggtgttcgaaaataaattgtactggtcagattggtcaactcgttccatccaaacttgtgacaaatttactggcaaagatcatcacactctggttaaagaagataagtatatatatggaatcagcatattccattcagctctccacagaagacttgataatccttgtgcattgtcctactgtagcgatatttgcttgctgaagggaaatacctacagctgtgcctgccctgagaataaacttctgggaagtgacaagcattcatgtaaagatattggacccacagaaacgttgatcgctgggactcaagatagtttagttcatatagagcacaaatttttgggaaaacatgatgtcacgtatctgcccagtatagttaaaaaaattggttgcttggcttatgatagtattaataactcactactgatcagcgacttggagttgaaaaaaatcgttaacttggatttggatgatggaatcaataaagttcttgaaattgatggattaggaagtataacagcaatggattatgatgctaaaggaaataacctctatgtatgtgatagggagaaacgaaccttggaagtaatcagtctcaatactttgtcaaaaaaaattcttctgaacttcatgaacggggaaattccagaagctgtggctgtggttccggatgaaggggtgatgtttgtcagtttgagagaagcagaaggtacattttgtcatttggatcgcttctatatggacggaacgggaaggacacacaccttagaagatcatctgataggccctatatcactacgctatgaccatgatttgaacagagttttctttgctgatgctggtactggattgatagaatcaactagtgttgaaggagacgatcgacatgatttccgaaggctaacaacccacccctctagcatcacaactcttaaaaatgatctattctgggtgaacgaaaactccaagcgtttgtattgggcagagaagaaaagcatttcaatgtataacagaaaaattaccctagatctctccagagaaccagagaaactccatctaatatcagtaacccccagaaaaaatgtgttgagcgcttgttggctcaacaacaatggatgcagtcacctttgcctcatgtcgcacaagacaacggtttgcgcttgtccaactggctacgaactatccgacgaccacaggacttgcatccgacgcgtgcattgcgactcttctgaattcttttgccctcagtctaacgtctgcgtcatgaagagcttaagatgcaattcacatcaggactgtgcatttggagaagatgaactgaactgtgacataaacagatgcacaaccgggttcttccgttgcgataatggcgattgcatcaaagaacagctagtgtgcgaccatcattacgactgcagggataaatctgacgaagataattgcgctgagaagaagaaacacgtgggatgtccgccaaagcactttagatgcgggaatggagactgcatttcagatagattcatatgcgatggttataaagattgtgaggatagctcggatgaaaagggctgcgagaagatgttctgttcggataccgaatttagatgcgattctggaacatgtattcctagtagctgggagtgcgaccacgaatatgattgctcagattcctccgacgaacatcccggatgtgcttccatcacctgttctgcaaccatgttcacttgtggaaatggcaaatgcctcgataaaagtcttgtctgcgacaaaagcgatgactgtggcgataattcagacgaaacgtcctgcttcaaacgcccctcctcttgccttccgcaagaattttcttgtccttcgaatacctctatctgcgtccctatgtcagccaagtgcaatggatccgtcgagtgtcctaagggagaagacgaggaagaatgtggcgactgcatgccggatgagttccgctgtctcaacaagcaatgcattgcggcacaatggatgtgcgatggcatcaacgactgtgatgacggcagtgatgaaactgctgaaggttgctcgcagaagaataaaaccacgggggagatgtccgtggttcatactgcctgtgaaaatggattcaggtgtaaaaatggagattgcttggatatgaaactggtgtgtaatggaaatcacgattgttacgatggttctgatgaggatggactgtgttcaacttcctgtgaaggatcagccaatcgatgttctcaaatatgcaataaaactccaatgggaccgtcttgcgagtgtagatctgggtttatattgatgggcaatggggtcagctgcatggatttgaatgaatgccagaatcatccaccagtgtgcagtcaaatttgccacaatcaggacggcggtttcaaatgcgattgttatgatggctttttactgagatccgacaagaaatcttgcaaagcagaaggaaatccgatgtcgctcattttcagtgaatatgggcaaataagggaactctcgcaattgactaatatcttgtctgttgtatttgccactcctgcaccaaaaataactggcctagacgtacttgtcaatccaagaaccatctatttcagcatggaggaaacttccacgattcacaaaatcgatatggcatcaaaaacgagacatttcataaggaatattggacaacctcaggacattgctgttgattggtctactcacaacatctattactataacacggacaccaactcgaaatctatcagtatttgtagtttcgaagaaaagtgcgcgaagttgattgatgttgacatgcacagacaagtggcaggattggttgtcgactctgtcaacaaatttttattttatgctttgaacagttggtacgtgttcaattcccccagttacgttatctacaggtgcaacttggatggaactgagaagacggaaataatgaaaactacagatgggtttgtatccgacatcacttttgaccacaacagtaggatattgtactacatggatatgtacttgggtcaaataaataagataacctatgatggtagtttcaaaactccaatttattccaatatcacccgatcctcagggcttaagttcttcgagaaccgattatactattctacgaatgggggatttgtttcagtttgcaggttatacggatttctgagatgtgatagtttcaggcttcacaatgatgcaatagatttcttcactattctacaagagacgcttcagccgagtgtgggtaatccttgcaagaaccacaattgctccaacttatgcgttccagctcagtttggatataaatgtctctgccaggatggaacgcttctatctggaccaggaagttgtccaattaatgagaataccccagagtccgacaaaaaatatactgttcactcggtggcgatgacacaggctggtcctgaggagggaagttcgggtactgtagctgttgccatcacgatacctcttctggtgatattatttgctttgggagccatttactttatcaagaaaaagcatgcaggagctttgaatgtcaggatgagattttatactcctcatttcggaaggaccgttcaagatgaaaatcctattctaaagcctggtcaacatgaatacacaaaccctgttcattttaataaagaagataatgaattaactctagaaacagcacctatcaaactgaatgatgcctcgaatgtgtgatatttaataagtttctttgggttttactttttatattgttgttttatcgtttgtataagttttatcgatgttaaatattgaaatgttatatttttaccgttatagttcataaatgaagaggaatgcttcagagtgaatattgaatttgaagtgtgatattgatagcattgttatacatttagctattacacaggatgaacaatgtacacatcctccatatatttattatcattgaaaaatgaataaatcattttaatagtacctactgaaaa

SEQ ID NO: 23 - DNA, 4413 bp, Phyllotreta striolata
atgttactcgtattgctcctgggagcagtaacagtctcttcgtcagcagttttcccacccaaaggaaattgcacctccgaacaattccaatgctccgatcgaagatgcataagcctcaaagccagatgcgacttgataatggattgcccggacggatcggacgaattggaatgcgatttgcagctctgcgatgagccggagttcttccgctgtaaaaataacaaatgcatcagtcacgatttggtctgcgataaaatgaacgattgcgacgacttctccgacgagttgaactgccaaagcttccagtctttggtggcgtcggcttgcgaggagggcacctggaggtgcgccgataaattgtgcatacccaacgattgggtgtgcgacggcacgccggaatgcatcgacggatccgacgaaaccatcggttgcagcaggcaaatcgactgcgacgggttccgctgcaagaacaagcattgcgtgcccaaagagtgggtctgcgaccatcacaacgattgcatcgataacagcgacgaagagaactgcgaggaccacgtccccatcgaccagtgcacgttggacaagcgcaagttcctctgccacaacaacgtgacgtgcatcgatacggaatcggtttgcgacggacacaaccactgtccggacaattcggacgaatcgcccaattgcaacgcgtccgccaaggcgtgccggggcgatcacaagtgctcgcacgtttgcataccgctgcccgccggccccacgtgcctctgccccctcggctaccacacgctcgacgagaagaactgcgaggacatcaacgaatgcgaaacatacggtatatgcgatcaaatgtgccggaacacgccgggctcgtacgagtgctactgcgacaaggcgtaccatttggcggatgacaagaaaacctgcaaggccgatggcgaggtgggcgtcatggtgttcagttcgaaggatcagatcagagcggtggcgttgaatttgaccagttacatcctcgtcgctaagaacttgaagaaagtggtgggcgtcgatttcgacggtcgcagggtctactggacggagatatacgggggctacgagaacatcgcccggagcgccgaggacgggtcgcaaaaggaggttttagtaacggccggtatagatctgccggaggatttggccatcgactggttgacgggtaacatttatttcaccgatggcgagaagaaacacataggagtttgctcgcccgacgggacccattgcgctgttttaatcaataaggacatcgcgaaacccagaggcatcgttcttaacgtcttggacggcgacatgtattggacggattgggaagaaccgtcgcgaatcggttactcattaatggacggatcaaatgataagcccttcgtagaaaaagacattcattggcccaacggtttagcattggatcatcctaatagcagactgtactggacggatgctaagaagatgacgttggaaagcatccgtttagatggaactgatcgaaggataatattagaagatatcgtaaagcatccgtacgccatagcggtattcgaagataaattgtactggtcggattgggcgacgcgcaccatccagcagtgcgacaaattcgacgggaagaatcaccggacgatgatcgaagagaaggaactcatctacggtatcagcatataccatccggcgcaacagtcgcgcagcgtaaatccctgcgagacggccctgtgcagcgacctgtgcttgctgaaaggtacatcgtacagctgcgcttgtccgcagaacaaggtcctacagcccgacggaatgttttgtaaagaattgtcgcctatagagagtctcatagccgctcatcgggacatgttggtacacatcgagcatccgattctcggcaggcatgttgttacagctctaccgggcgccactggagacattgaaagcttggcattcgatagcttcaaaaacgtactgtacatcagcgatttcaagactaagagaatcaccactttgcacatgaagaccggtaccagcaaagtaatggatatacccgatttgggtagaatcaacgctatggatttcgattccaaaagcaacaatctttacatctgcgattcggtccgcaaagtggtagaagtaatcagtatcaacacgatggctcggcgaattttaattcacgacacgttaggagagtacccgcaaagtatcgcgttagttcccgacgaaggggtgatgtttataagcttcggaggcgagggacgcagccacatcgatcgcttcttcatggacggcaccggccgaacgcacgccatcgacaccaaactgacggggcccgtcgtgctcgcgtacgacgccgatttgcacagggtcttcttcgccgacgccgccaacggcgtcatcgaatccaccagcgtcgacggcgacgatcgcatccacttcagaaccgtcgacacgcaccccaccagcctggtggtcctcaaagacgacgtgttctggatgaacgcccgctcgaagcagctctactggacgtcgaagaaagtcccctcgaactacgacaagaaaatcacgctcgccttccccgacgatccggacaaggtgcacctggcgtcggtgacgtcgcgccgcaaggagaccaacctctgtcgcatcaacaacaacggttgcagccacttgtgcgtccaatcgcagaaatcgatcgtgtgccgatgtccgatcggttgggaactgaaacaggacaatcgcacgtgcgccaagcgagtgggttgcatcagcgacgaatttctgtgcgcgcagtccaacgcgtgcatcgtgaagagcctgcgttgcgacggccggaaggattgcctcttcggcgaagacgaggacgattgcgcggcgacgaagacgtgcggcgacgggcagttccgatgcgccgacggcgattgcatcgccgaagggctggcgtgcaacctgcgctacgattgcaaggataaatcggacgagcacggttgcggcgacgtgatgaacggcacgcgatgcgcgcccgatcacttcgcctgctcgaacggcgaatgcatcagcgggcatttccactgcgacggcgtctccgattgcacggacaatacggacgagttgcactgtcagacgaaggagtgcaatgtaacgcagtttaggtgcgattcgggcgcttgtattcccaaggagtgggagtgcgatcaggattacgattgcgcggataattccgatgaacattgcgatacggtatgcccggcgagccacttcaaatgcgacaacggcctgtgcgtggataagaaattattgtgcgacggtttcgacaattgcggcgaccattccgacgagaagattcacatgtgtcaccagagggccccgcacaattgcaccgcctacgagacggcctgctcgtccaacgcttccatttgcattcctttgggagcgaaatgcgacggcaaatccgactgtcccaagcacgaggacgagatcggctgcgccatgtgcgccgacgaggatttcgaatgccgcagcaaacacctcaaggactgcattccgagattgtggttgtgcgacggcgagaacgattgcggcgacaacagcgacgaggacttggtgatgtgcagtaaaaagaacaagaccacgttcgctccggcccaacaaccctgcaccgacggcttcagatgcgacaacggcgtttgcatcaactctacgttgctctgtaacggcaaacacgactgctacgacggctccgacgaaggaggctcctgctccgggtcctgcgacggccccaagaatccctgcaaccacgtctgcgtcaagacgccgaagggaccgaagtgccggtgcagaccgggctaccggttgatgggcgacggtaaaacgtgcgtcgacgtgaacgagtgcgaggccgatccgccgatatgcagccaactttgccgcaacaaagatggcggttacacgtgcgattgtttccaaaacttttatttgaggaagaacatgaaatcgtgcaaagcggccggttccgacatgttgatctacttcaacgtgaacggtgacgaaatctacgaaatctcgccgaagaacaattcgatgagcgtcgtccaggacgggtcgatgttgaagatctcgagtctggccgccgtggtggactcgaacgagctgttctacagcgtacccgacaccggcgccgtctacaagctcgatccggccaccaaaaccgttcgctacatcgagaacttgggcgagcccaaactgatagcggtggattgggcgacgcgtaatgtttattattacgacgccgaatcggacgcgaaatcgattggagtgtgcaatttcgaggagaagtgcgtcaaattgatcgacgtcgatgctcatcggcaggtgtccgccttgaccgtggattcataa

SEQ ID NO: 24 - DNA, 5529 bp, Phyllotreta striolata
aactcgtgttacttacctttgaaaacgatcagtttcacgtggcctgctcgaaataattgagagaatgttactcgtattgctcctgggagcagtaacagtctcttcgtcagcagttttcccacccaaaggaaattgcacctccgaacaattccaatgctccgatcgaagatgcataagcctcaaagccagatgcgacttgataatggattgcccggacggatcggacgaattggaatgcgatttgcagctctgcgatgagccggagttcttccgctgtaaaaataacaaatgcatcagtcacgatttggtctgcgataaaatgaacgattgcgacgacttctccgacgagttgaactgccaaagcttccagtctttggtggcgtcggcttgcgaggagggcacctggaggtgcgccgataaattgtgcatacccaacgattgggtgtgcgacggcacgccggaatgcatcgacggatccgacgaaaccatcggttgcagcaggcaaatcgactgcgacgggttccgctgcaagaacaagcattgcgtgcccaaagagtgggtctgcgaccatcacaacgattgcatcgataacagcgacgaagagaactgcgaggaccacgtccccatcgaccagtgcacgttggacaagcgcaagttcctctgccacaacaacgtgacgtgcatcgatacggaatcggtttgcgacggacacaaccactgtccggacaattcggacgaatcgcccaattgcaacgcgtccgccaaggcgtgccggggcgatcacaagtgctcgcacgtttgcataccgctgcccgccggccccacgtgcctctgccccctcggctaccacacgctcgacgagaagaactgcgaggacatcaacgaatgcgaaacatacggtatatgcgatcaaatgtgccggaacacgccgggctcgtacgagtgctactgcgacaaggcgtaccatttggcggatgacaagaaaacctgcaaggccgatggcgaggtgggcgtcatggtgttcagttcgaaggatcagatcagagcggtggcgttgaatttgaccagttacatcctcgtcgctaagaacttgaagaaagtggtgggcgtcgatttcgacggtcgcagggtctactggacggagatatacgggggctacgagaacatcgcccggagcgccgaggacgggtcgcaaaaggaggttttagtaacggccggtatagatctgccggaggatttggccatcgactggttgacgggtaacatttatttcaccgatggcgagaagaaacacataggagtttgctcgcccgacgggacccattgcgctgttttaatcaataaggacatcgcgaaacccagaggcatcgttcttaacgtcttggacggcgacatgtattggacggattgggaagaaccgtcgcgaatcggttactcattaatggacggatcaaatgataagcccttcgtagaaaaagacattcattggcccaacggtttagcattggatcatcctaatagcagactgtactggacggatgctaagaagatgacgttggaaagcatccgtttagatggaactgatcgaaggataatattagaagatatcgtaaagcatccgtacgccatagcggtattcgaagataaattgtactggtcggattgggcgacgcgcaccatccagcagtgcgacaaattcgacgggaagaatcaccggacgatgatcgaagagaaggaactcatctacggtatcagcatataccatccggcgcaacagtcgcgcagcgtaaatccctgcgagacggccctgtgcagcgacctgtgcttgctgaaaggtacatcgtacagctgcgcttgtccgcagaacaaggtcctacagcccgacggaatgttttgtaaagaattgtcgcctatagagagtctcatagccgctcatcgggacatgttggtacacatcgagcatccgattctcggcaggcatgttgttacagctctaccgggcgccactggagacattgaaagcttggcattcgatagcttcaaaaacgtactgtacatcagcgatttcaagactaagagaatcaccactttgcacatgaagaccggtaccagcaaagtaatggatatacccgatttgggtagaatcaacgctatggatttcgattccaaaagcaacaatctttacatctgcgattcggtccgcaaagtggtagaagtaatcagtatcaacacgatggctcggcgaattttaattcacgacacgttaggagagtacccgcaaagtatcgcgttagttcccgacgaaggggtgatgtttataagcttcggaggcgagggacgcagccacatcgatcgcttcttcatggacggcaccggccgaacgcacgccatcgacaccaaactgacggggcccgtcgtgctcgcgtacgacgccgatttgcacagggtcttcttcgccgacgccgccaacggcgtcatcgaatccaccagcgtcgacggcgacgatcgcatccacttcagaaccgtcgacacgcaccccaccagcctggtggtcctcaaagacgacgtgttctggatgaacgcccgctcgaagcagctctactggacgtcgaagaaagtcccctcgaactacgacaagaaaatcacgctcgccttccccgacgatccggacaaggtgcacctggcgtcggtgacgtcgcgccgcaaggagaccaacctctgtcgcatcaacaacaacggttgcagccacttgtgcgtccaatcgcagaaatcgatcgtgtgccgatgtccgatcggttgggaactgaaacaggacaatcgcacgtgcgccaagcgagtgggttgcatcagcgacgaatttctgtgcgcgcagtccaacgcgtgcatcgtgaagagcctgcgttgcgacggccggaaggattgcctcttcggcgaagacgaggacgattgcgcggcgacgaagacgtgcggcgacgggcagttccgatgcgccgacggcgattgcatcgccgaagggctggcgtgcaacctgcgctacgattgcaaggataaatcggacgagcacggttgcggcgacgtgatgaacggcacgcgatgcgcgcccgatcacttcgcctgctcgaacggcgaatgcatcagcgggcatttccactgcgacggcgtctccgattgcacggacaatacggacgagttgcactgtcagacgaaggagtgcaatgtaacgcagtttaggtgcgattcgggcgcttgtattcccaaggagtgggagtgcgatcaggattacgattgcgcggataattccgatgaacattgcgatacggtatgcccggcgagccacttcaaatgcgacaacggcctgtgcgtggataagaaattattgtgcgacggtttcgacaattgcggcgaccattccgacgagaagattcacatgtgtcaccagagggccccgcacaattgcaccgcctacgagacggcctgctcgtccaacgcttccatttgcattcctttgggagcgaaatgcgacggcaaatccgactgtcccaagcacgaggacgagatcggctgcgccatgtgcgccgacgaggatttcgaatgccgcagcaaacacctcaaggactgcattccgagattgtggttgtgcgacggcgagaacgattgcggcgacaacagcgacgaggacttggtgatgtgcagtaaaaagaacaagaccacgttcgctccggcccaacaaccctgcaccgacggcttcagatgcgacaacggcgtttgcatcaactctacgttgctctgtaacggcaaacacgactgctacgacggctccgacgaaggaggctcctgctccgggtcctgcgacggccccaagaatccctgcaaccacgtctgcgtcaagacgccgaagggaccgaagtgccggtgcagaccgggctaccggttgatgggcgacggtaaaacgtgcgtcgacgtgaacgagtgcgaggccgatccgccgatatgcagccaactttgccgcaacaaagatggcggttacacgtgcgattgtttccaaaacttttatttgaggaagaacatgaaatcgtgcaaagcggccggttccgacatgttgatctacttcaacgtgaacggtgacgaaatctacgaaatctcgccgaagaacaattcgatgagcgtcgtccaggacgggtcgatgttgaagatctcgagtctggccgccgtggtggactcgaacgagctgttctacagcgtacccgacaccggcgccgtctacaagctcgatccggccaccaaaaccgttcgctacatcgagaacttgggcgagcccaaactgatagcggtggattgggcgacgcgtaatgtttattattacgacgccgaatcggacgcgaaatcgattggagtgtgcaatttcgaggagaagtgcgtcaaattgatcgacgtcgatgctcatcggcaggtgtccgccttgaccgtggattcataaattgatcgacgtcgatgctcatcgacaggtgtccgccttggccgtggattcgtacaacaaggttttgttctatgtgctgagatcgtggacgatattcgcatcgcccagttacgttttgtacaaaaccgatttggacggtagcaacgtggtggaactgatcaaaacaaatataggtaacgtggaacacatcacctacgatttgaacaaacgccagttgtacttccacgacgaaaacacccatcaaatcaacacgatcggctacaacgggggcaacgtcaaaccgctcttctacaatgtatcatcactgatcgaagggctcaaactgttcgaagacaatttgtactatctgcgccaggacgggttcctcattaggtgtcagttgttcgaagaggccgtctgtcactacggtttcaatttgcacagtctggccagggacgatttcgtcatctcgcaccgatcccttcagcccttggtcgaaaacgtctgcgacggtcacagttgcccttacatgtgcgtggccggacgagagggctacaagtgcatttgccacgatggctcgactactggcgaatgcggtacaccacaagacgacaacggtgcgaacaaattcaaagtaaccaccattgaaggaaaatccaattcttcggcgttcttgtcgggcttcggggtggtactcgtgttactcgcttgcgtcatgtttatagttgggttgtattacttgctgaagaagagaagcgcagaaaacagtacagcagatttaagtattgtccgttttcaaaatccgctttacggaagaccggtggaagacgagaaaccgatcttggaacccggcaagcacgagtacgtgaattgtttgtacgaacacaaaacggatggcggcgaaaacagcaatgcggaacccaaaacgtttaacgtctgtgatgataatttgtgttaatttattgttttttttatgttttacgttaattaagtgcattatttgattgttaattctatttataacacattattatgtatatacaaaatttgttaaatatttaataaatatagag

SEQ ID NO: 25 - DNA, 5226 bp, Halyomorpha halys
atgctgtcgccacgatataggttaaaattttccaacgatttgaagtttttgtttgcgactatattaatcgctttggtcacttctactgaacagcatgatacagattgtgatgaaaatttcttcagatgccgcaatggtagatgtatatctctcagctttatttgcgatggttacgaagactgcggccatggggacatgtctgatgaagaaaattgccatttgaccactaccccagcagtgaaaccgtgcaataaagatgaatatcagtgcaaagataggctgtgcattccttcgttatgggtctgcgatggtgaatcagactgttcggatggcagcgatgagactcatggatgtagtgaggcgacctgtgacggttttcagtgccacagcaaatcttgtatccccaaagagtgggagtgcgatggcgtacgtgattgtccagataactcagacgaacagttctgtgctaagaaaccagtgagcactgaagaatgcaatattcatgaaaatggtttcatgtgccatgatagtatgaaatgcattgaactggaagaagtctgcaacagtcaccctgattgcgatgatggttctgatgaaggtggtatgtgcctcaatccgaacaaaacagatttatgctctaatctgaaatgtcccacaaatcaaggctgtataatattacccgagggcccggtatgtactgaggtgtgcaagaaaggataccacttcgccagtggttcttgttttgatatcgatgaatgtataacatttggaaggtgtgatcaaatatgtataaacacaaatggaggctacaattgctcctgcattgaaggctatagatttgataatgatttgaaaaaatgcaaagctagaggaagtgaaggtatactatttttcacttcaaatcaagaaataagaggatattatttagactccgaaatctactttaaagtagttgaaaatctaccacatgcaacaggagtagcatatgatggtgttaatgtttactggacaacagtagcagatgaggaagaaacaattgtcaaagcagctgaaaatggtgaaaatcagaaaataattgtaacttctggtattggcagtcctgaagatctagcagttgattgggttacaaaaaatgtatacttcacggattctaaattaaagtatgtaggtgtttgttccaatgatggatactattgccttatactccatgaagatcaagttgagaaaccacgtgctattgttctgcattcatcagagggactgatgtattggtctgactggggaacagaacctgccattatgcgttctggaatggatggatctaatgttatcaaattcataaaagataacattcattggccaaatggattagccattgactatgggacaaattatatatattgggttgatgctaaagaagcaaaaattgaatgtgtgaaactagatggaactgacagaagaaaagtaccatccagtgctgtgaaacatcccttttctattgatatttttgaagatagaatctactggagtgactgggacagtgaccaaattgtatcctgcaataaattttctggtaaagattgccatacaataataaaggaaagagatcacaagatttatggtatccatgtataccatcctagcatgataaaagaagttattaatccatgctttgatgttcaatgctctgatatatgcttaatagctccaaaaaatgcagataatgagttggaatattcttgtgcttgcccatatcacaaaaaacttagcagagatcatcatacatgtattgaggataaaccacttcaaactataattgtgggttctggacagcagatcttcaaaatccaacacaaaaaatttggaggatttgtttcagaccattttaaactaacaatattaaggaaaataggtgctctagcttatgatccaaattcagataaaatcattgttagtgatttggttagacgaaaaattttttcagtcgactggaaaactctagagtcagagccattaattgaacacaacattggtagagttgttggtatggatgttgactattatgaaaataatctatattggatcgatgatgagaaaaaaactattgaagttatgaacctacaaaacaaacaccgattaacactaatacgagatctaaatgaaggtcttaatgatatagcattagtgttagaacatgggtttatgtttgtcgctctttcaacatttgaaggagcacacattgatagaatatcaatggatgggcgacatacttcaaggattcatgttattgaagacaaattatttggcccattgtctctcagctatgatcctaaacttgagcgtctgttctggtctgaccaaatgggaggtgaaatagcttccacaggtgttgatgggattgatcgacatatttttaaagaaggacattctggtccagtagatgtggcaattactgaatccgaagtgttttggcttggctatggagccagaaaagtcttttggtcaaataagtttgatggatcgcttacaaaaagatttcttttagactcacttgatgaaactgataatatgaaaatcattggattaaataaaggtttaagaaaggaagcaagtgcttgtaattccctcggaaactgcagccatgtttgtttgctttcaacacctatggggatttgtgcatgtcctgatggaatggagcttggatttgatagaaaaacctgccaaaaattgcttgcatgtaaagaaggacaatacaaatgtaccactggagaatgtatttcaaaatccatgcgatgtaatggtagaccagattgtaggcttggtgatgatgaagagtattgttctataatttgttcaacaaacaagttcgcttgcatagatggttctagttgtatagaacaatctcaaaaatgtgattctaaagttgactgcaatgatggttctgatgaaaaatattgtgaatcaaatcgaaattgtactggaaatgaattccaatgtacgtcaggagaatgtgttcctaaagtggcacagtgtgatggcatgagtgattgcagtgatggtagtgatgaaagcagttgtaatactttcacttgcaaaaccaattacttccgttgcaacacaggaaattgtataccaagctcatgggaatgtgacagtcagattgactgtagcgacggttctgatgaaggtcctaaatgttctgagattgaaggatgtggtgaggatcagtttacttgtgataatggtcactgcatttcacatgttttggtgtgtaaccatgaagatgattgtgaagactcatctgatgaaaaatattgttactttccaaaaaccaaaaaaaattatgaaaatgaagaaaataagactaagggcttatcaaaggattgccagtttttatgtccttcagatttaaaaatatgtttgcctgcatcagggagatgtaatggtacttcagaatgcccagacggagaagatgaacttcgttgcaacaagtgttcagaggaagaattcacttgttcttctagtaagcgatgtttgccaatgacatgggtttgtgacaatgtcagtgactgtgaagaccagtccgatgaaatgcattgtcttaatggaaccctggctgtacatgatttgtataatcttcagtgtgatggtttattctgcaaagataataaaaaatgcattccattaaataaactgtgtgattctcatatggattgtaatgatgggtctgatgaaaaaggtctttgtggtaagggatgtgaacatgctgcatgtcatcacaaatgtaaagagacacccatgggacctaggtgtgaatgtttaagtggttttactctagaaggcgatgggagggcatgtaatgatataaatgaatgtgaaaaactgtcttcttgctctcaatattgccataattctgttggcagttacagttgttcatgcatggattataactttcaactaagatctgataagattaggtgcaaagcaaaaggaactgaaatgaagtattactttgccacaaaaaaagaaataaaatataaatcacaatccttacagcaaactgttgtagtatatcaatcacagcgtgatatggatatgaaaggaatggattttgatatgaatagtgatgtaatattttggacttcagagattagtggttatttgtacaaagttgatattaaatctaaaaatgtcactcaaattacaaatctcattagaccaactaaagtatcatatgactgggttactggtaatatttatgtccttgaaaacttcaaaattattagagtttgtaactttaaagctaaactttgttcagcaatatacacagctaagaatggtataaacatagaaactattgttcttgatccaaaatcaagaatcatgttctggtctgaaagtaaatggttaatgagccaaacaccaaatagtacacttcaacaggcctcaatgagtgcagaaaatccaagtgtagtgctaagttttgattttagtccagttaatgatattgtagttgatcattttcacaaggttgtttactggtcaaaccccattgataataaaatagaaagatgtacatatgatggaaaagacagaactatagtagtgcgtagtgagtatcctccaagagacttggtactatttgaagattatttgtactgggtaaatgatcaaaaacaatctcactttattcgcccagaagcagaaggaactattactaagtatggcctgtatggatcagtgtacatgaaacatgaatcagtaaggcttttaccttcttcatcctataatgaaattaaagctttccaagtttcacagtctgcactccagcctgaaggaataaaccactgcagtaaaattacttgtaattacctgtgtataagcaatgaaagagaaccagtatgtttctgtgaagatggcttaaaagtgaaacctggtgatatatgctacaatcatactgggatacatttcaaagcttacgaaacagaaaatgtagcagagagtagttcagtattgacatggtttttctggattgttgggttagttctagcatctggacttggttatggaagttattattttgtagctaactacgttcagaaaaataaaatacacccacggttcagtgtattttttcctgttggccgttctgagactcatagagaacaaggatctcaggttcatcaatttgaaaatcctacgtatagtgaggtcattgtggtataa

SEQ ID NO: 26 - DNA, 5718 bp, Halyomorpha halys
gctgaacctctgtaccttggatcttcagttcccatttcattttaccaaggcttccagttagcttcgaactatgctgtcgccacgatataggttaaaattttccaacgatttgaagtttttgtttgcgactatattaatcgctttggtcacttctactgaacagcatgatacagattgtgatgaaaatttcttcagatgccgcaatggtagatgtatatctctcagctttatttgcgatggttacgaagactgcggccatggggacatgtctgatgaagaaaattgccatttgaccactaccccagcagtgaaaccgtgcaataaagatgaatatcagtgcaaagataggctgtgcattccttcgttatgggtctgcgatggtgaatcagactgttcggatggcagcgatgagactcatggatgtagtgaggcgacctgtgacggttttcagtgccacagcaaatcttgtatccccaaagagtgggagtgcgatggcgtacgtgattgtccagataactcagacgaacagttctgtgctaagaaaccagtgagcactgaagaatgcaatattcatgaaaatggtttcatgtgccatgatagtatgaaatgcattgaactggaagaagtctgcaacagtcaccctgattgcgatgatggttctgatgaaggtggtatgtgcctcaatccgaacaaaacagatttatgctctaatctgaaatgtcccacaaatcaaggctgtataatattacccgagggcccggtatgtactgaggtgtgcaagaaaggataccacttcgccagtggttcttgttttgatatcgatgaatgtataacatttggaaggtgtgatcaaatatgtataaacacaaatggaggctacaattgctcctgcattgaaggctatagatttgataatgatttgaaaaaatgcaaagctagaggaagtgaaggtatactatttttcacttcaaatcaagaaataagaggatattatttagactccgaaatctactttaaagtagttgaaaatctaccacatgcaacaggagtagcatatgatggtgttaatgtttactggacaacagtagcagatgaggaagaaacaattgtcaaagcagctgaaaatggtgaaaatcagaaaataattgtaacttctggtattggcagtcctgaagatctagcagttgattgggttacaaaaaatgtatacttcacggattctaaattaaagtatgtaggtgtttgttccaatgatggatactattgccttatactccatgaagatcaagttgagaaaccacgtgctattgttctgcattcatcagagggactgatgtattggtctgactggggaacagaacctgccattatgcgttctggaatggatggatctaatgttatcaaattcataaaagataacattcattggccaaatggattagccattgactatgggacaaattatatatattgggttgatgctaaagaagcaaaaattgaatgtgtgaaactagatggaactgacagaagaaaagtaccatccagtgctgtgaaacatcccttttctattgatatttttgaagatagaatctactggagtgactgggacagtgaccaaattgtatcctgcaataaattttctggtaaagattgccatacaataataaaggaaagagatcacaagatttatggtatccatgtataccatcctagcatgataaaagaagttattaatccatgctttgatgttcaatgctctgatatatgcttaatagctccaaaaaatgcagataatgagttggaatattcttgtgcttgcccatatcacaaaaaacttagcagagatcatcatacatgtattgaggataaaccacttcaaactataattgtgggttctggacagcagatcttcaaaatccaacacaaaaaatttggaggatttgtttcagaccattttaaactaacaatattaaggaaaataggtgctctagcttatgatccaaattcagataaaatcattgttagtgatttggttagacgaaaaattttttcagtcgactggaaaactctagagtcagagccattaattgaacacaacattggtagagttgttggtatggatgttgactattatgaaaataatctatattggatcgatgatgagaaaaaaactattgaagttatgaacctacaaaacaaacaccgattaacactaatacgagatctaaatgaaggtcttaatgatatagcattagtgttagaacatgggtttatgtttgtcgctctttcaacatttgaaggagcacacattgatagaatatcaatggatgggcgacatacttcaaggattcatgttattgaagacaaattatttggcccattgtctctcagctatgatcctaaacttgagcgtctgttctggtctgaccaaatgggaggtgaaatagcttccacaggtgttgatgggattgatcgacatatttttaaagaaggacattctggtccagtagatgtggcaattactgaatccgaagtgttttggcttggctatggagccagaaaagtcttttggtcaaataagtttgatggatcgcttacaaaaagatttcttttagactcacttgatgaaactgataatatgaaaatcattggattaaataaaggtttaagaaaggaagcaagtgcttgtaattccctcggaaactgcagccatgtttgtttgctttcaacacctatggggatttgtgcatgtcctgatggaatggagcttggatttgatagaaaaacctgccaaaaattgcttgcatgtaaagaaggacaatacaaatgtaccactggagaatgtatttcaaaatccatgcgatgtaatggtagaccagattgtaggcttggtgatgatgaagagtattgttctataatttgttcaacaaacaagttcgcttgcatagatggttctagttgtatagaacaatctcaaaaatgtgattctaaagttgactgcaatgatggttctgatgaaaaatattgtgaatcaaatcgaaattgtactggaaatgaattccaatgtacgtcaggagaatgtgttcctaaagtggcacagtgtgatggcatgagtgattgcagtgatggtagtgatgaaagcagttgtaatactttcacttgcaaaaccaattacttccgttgcaacacaggaaattgtataccaagctcatgggaatgtgacagtcagattgactgtagcgacggttctgatgaaggtcctaaatgttctgagattgaaggatgtggtgaggatcagtttacttgtgataatggtcactgcatttcacatgttttggtgtgtaaccatgaagatgattgtgaagactcatctgatgaaaaatattgttactttccaaaaaccaaaaaaaattatgaaaatgaagaaaataagactaagggcttatcaaaggattgccagtttttatgtccttcagatttaaaaatatgtttgcctgcatcagggagatgtaatggtacttcagaatgcccagacggagaagatgaacttcgttgcaacaagtgttcagaggaagaattcacttgttcttctagtaagcgatgtttgccaatgacatgggtttgtgacaatgtcagtgactgtgaagaccagtccgatgaaatgcattgtcttaatggaaccctggctgtacatgatttgtataatcttcagtgtgatggtttattctgcaaagataataaaaaatgcattccattaaataaactgtgtgattctcatatggattgtaatgatgggtctgatgaaaaaggtctttgtggtaagggatgtgaacatgctgcatgtcatcacaaatgtaaagagacacccatgggacctaggtgtgaatgtttaagtggttttactctagaaggcgatgggagggcatgtaatgatataaatgaatgtgaaaaactgtcttcttgctctcaatattgccataattctgttggcagttacagttgttcatgcatggattataactttcaactaagatctgataagattaggtgcaaagcaaaaggaactgaaatgaagtattactttgccacaaaaaaagaaataaaatataaatcacaatccttacagcaaactgttgtagtatatcaatcacagcgtgatatggatatgaaaggaatggattttgatatgaatagtgatgtaatattttggacttcagagattagtggttatttgtacaaagttgatattaaatctaaaaatgtcactcaaattacaaatctcattagaccaactaaagtatcatatgactgggttactggtaatatttatgtccttgaaaacttcaaaattattagagtttgtaactttaaagctaaactttgttcagcaatatacacagctaagaatggtataaacatagaaactattgttcttgatccaaaatcaagaatcatgttctggtctgaaagtaaatggttaatgagccaaacaccaaatagtacacttcaacaggcctcaatgagtgcagaaaatccaagtgtagtgctaagttttgattttagtccagttaatgatattgtagttgatcattttcacaaggttgtttactggtcaaaccccattgataataaaatagaaagatgtacatatgatggaaaagacagaactatagtagtgcgtagtgagtatcctccaagagacttggtactatttgaagattatttgtactgggtaaatgatcaaaaacaatctcactttattcgcccagaagcagaaggaactattactaagtatggcctgtatggatcagtgtacatgaaacatgaatcagtaaggcttttaccttcttcatcctataatgaaattaaagctttccaagtttcacagtctgcactccagcctgaaggaataaaccactgcagtaaaattacttgtaattacctgtgtataagcaatgaaagagaaccagtatgtttctgtgaagatggcttaaaagtgaaacctggtgatatatgctacaatcatactgggatacatttcaaagcttacgaaacagaaaatgtagcagagagtagttcagtattgacatggtttttctggattgttgggttagttctagcatctggacttggttatggaagttattattttgtagctaactacgttcagaaaaataaaatacacccacggttcagtgtattttttcctgttggccgttctgagactcatagagaacaaggatctcaggttcatcaatttgaaaatcctacgtatagtgaggtcattgtggtataatacaatataaatatgatgtttatttaagaaaaaacaaatatatgcatatatatatgtatacacttatatatacacatatatatgtatatatttatagatacacacattaaattaagttgtttatctttttctataggagaactctgaatttaaatctttgttaaacaatgaaatatctgtgaatcaagtgtagaaataattgatttacattgtaaacctccgtgtaacaagtttcttattaacattatattattaccatatcatataaatatgaatttcctagtaactgattgttcttattactatttttgactgattaaagtaatgtactctcagtttaaatcagcaaagagctatttaagctctataaaactgtattattatcaaatatttaatatttgaactgtaatttattgttttaa

SEQ ID NO: 27 - DNA, 5307 bp, Acyrthosiphon pisum
atggacaatggcgctgacgaagacgattgtgatattagcaaaaagccttgcctggcgccagaatactttgaatgtgataacaagagaaaatgcattcctaaggaatttgtgtgtgataagtcgaatgaatgcatcgacaagtctgacgaaagtcattgtaaagagacgtcatcatctttaacgcagtcatgccgggaaggaaaattcaaatgctccgatggcacttgtattccaatggcttggcattgtgacgcggagattgattgccacgacggtagcgatgaagacggagaaaaatgtagatacacgacattgtgtacctctggttatatgtgcaaaaacttcaattgcgtttcaaagacgtggagatgtgacggaaaagatgactgtggagatggttcagacgaaacccattgcgatatccaactggttgagccagaaaaatgtttaattgaaaatcgtaaatttctatgtcacgatcataaaaaatgtatcgatgtcagaaatgtctgtgattacaacaatgactgtcttgatgcatcggacgaaggtggtctttgcaataataaaactgatttcaaaagtgaatgtaattcgatgaattgttctgccgcatttgaatgtttaagaaagccacatggcattatgtgtgtgtgcccaaaaggaatgcattatttaaataataaatgttctgatatcaacgaatgtgaacaatatggtatttgtgaccaagtgtgtcttaatttggaaggttcatatacgtgctcctgtgatccacattatgaactagtagataatcataagtgtaaaataaaaggcctaaatccggaattattatattcatcactacgtcaaataaaagtttttaacttggaattacttcatagttttactttgattgatgatttgcaacatgtcactggattagctgttgataaattaactttatactggacactttatttggatgggaactcagctattgttagagcaaacaagtctgagcctaaaccagaaattattgttgactcgggtcttggatcgcctgagaatctagttatagatattattacacataatttgtacttcaccgatgcaaaaatgaaacatattggagtgtgcaataatgatggttcagtatgtacagttcttcataataaaaacatagacaaaccaagagcagtagctgtttcaccactagatggtctcatgtactggacagattggggtaaaaatccaatgattggtcgttctggtatggacgggtcaagaccacaaccgtttgttacacaaaatatacactggccaaatggtgttcatgttgattatgtcgggaaaagaatttactgggtggatgctaagatgcaatttattgaatccattaatttagatgcaactgatcgaagagtaattgtaacagaatatgtagatcatccatattcggttactgtgttcgaggataaattgtactggagtgattggtcaagtaaagaaataaaagtatgcaacaaatttacgggtaaagatagcaagacattgatacgtgaaaataagaacagagtgtatggcatgcaaattaaccatccctcgctcttcgagtctcaaatgccaaatccttgtgaacaaggaaaatgcagtgatatatgcttattagcaccgaaaacagaaatcaattctaaaggatactcgtgcgcttgccccgatgataaaaaactatcggaagatggaatcttttgtatcaccattgccatacctcctacgcttattgtgggtacaccaacaagtattatagaaattgagcaggaacatttaggccgccaaaaagcaaaaaaaatatcgttgaaaaatgatatatctagcatatccgcattgacttataattcattatctggtgacatcatcatctatgactcaaggtctaagaaattattcactttcgattttgttaagatgaaattatcagatttagatgtaccagaaattagttccatttattctcttgaattcgacaatcatggaaacaatttatactggtgtgataggactagaaaaacattagatgtgttaagtctctctacaaaaacacacacaacgatattcaaagaaattgaaggtcatatcccatttgccgttactttagttccagataaaagctttatgtttgtagctatgaaagaaggttcacacatacatatcgatcgaattgacatggatggaagtattcagtctctagtacatatggtggagtatggattgacaggagatgaaattgctttacattttgatatgattacaagactgttgtattttactgactataaaaatggcattattgatagtgtcagcgaagatggaacggatagaagaattataaaaaaagcaggatttgtaagagatattgtttcaattggttatgacattgtttgggtatctgaaggttcgaaaattttaaactggattgataacgttgatgaagaccgagcatctagagctcttgatatagataattggaaaactgattcaaatttatatttaaccgtagcaaatggaattcacaaaaatatacaacacccgtgtcaacaaaataatggtggttgtagtcatatatgccttttatctgagaaaggaaaggtttgtggttgtccacctggattagttttatcaaacaacagcctgaattgtacatcactaggagagtgtaaatctgatgaatatcgttgttacactggtgaatgtatttcatctcattcccgatgtgattttataaaagattgtcctcgtggtgacgatgaagacgttgttaaatgtttgcattacacaccaaactcatgtccacaatctcaatttttatgtcatgataaaacaaagtgcttggataaaaaacatatgtgtgatagtattaaagactgtagtgatggttcagatgaaatggattgtttacacaagcacacttgtgattcaactacagaatatcagtgtacatctggagagtgtattcagcgcatatttttatgtgatggtaatcccgactgtattaatggacaagacgagttaaattgtctgaaccaaagttgtaataatattacagaatttagatgtaattctggaaactgtatacctgcaacatgggaatgcgatggtgaggttgattgttttgatggttcggatgaacactattcatgtgctaccaaaaaatgtaaagatgatcagttttcttgcaccaatggtcgatgtatatcacataaattcacttgtaacggtaaagatgattgtggtgatagttctgatgaaaatggttgttcgtcaaatcatgcatacatgacaaaaagagtttcaaaagtatgtaatgaaaaaacagaatttgaatgtgaaaacacaatgggacattgtataccgatcaaggctaggtgcaacggcacatccgagtgcaaacatttagaggacgaattgaattgtggatgtcaaaaatctaattttttcgaatgtcagaataagcgttgtgtgttaaaagattggttatgtgataaacatgatgattgtggcgatgggtcagatgaaagtcaaaaggcgtgtgatatgctttctgaacatttatcgaattcagtcgtttcatcaaaagactgtgatggatatttatgtaagaaccaagaatgtatacctctagatcaagcttgtaataagaaaatcaattgtaaagatggttcagacgaaggagatctttgtggtttatcttgtatacacatggattgtagtcatacttgtcaagaaactccaaaaggtgggaaatgtacatgttatcatggctataaacttgcacaagatggtataacttgcagagatattaatgaatgtgaagacgacaatttatgtactcaatattgtacaaattcagatggttcatatagctgtagttgtttaaattctgattacattttgcgtgcagataaaagttcctgtaaagcaattggacccacaatggatttagtttattcgagtgttgatgaaataagaagtacttcaggagatattaaggaatcaaaattaattttttcgatgcctggaatgacaatatcgagccttgatatagatattagaagaaatcttatttattggacatcaaaacaagctggtgttcttatttgtatggatatgcaacaacagcataaattttacatgacagatttgttacacccaactttagttcgtattgattggttaacagaaaacgtttactttgtacaaaattttaaagatattgttgtatgttatttaaatgctaaacgttgtgccactatatacagtgcaaacatccatacaacaattatggcttttgaaattgatcctcgttccggagtgatgttctggtcggaaaccatatgggcagtattttcaacaccaacaactattattaggaaatctgattgcagtggatacaatgtaaaaactataatccatcaagggttacagtatgttactgatttagctatagatccaatcaaacatatggtctattgggtcgatcaagttaattcaacaatcgagaggtctaattacgacggaactaaaataactgtgttggtcaattcgatagaacatttgccagagaaaatatcattgtacgaagacaaactgttttggaccaaccatgaaaccgggttgtctatatttaaatgtaaagttctcggttctgaaaatgtccactgtgagtctgttcctgttcaagtgtttgctaccatcgagacattcacgataagtcaacaggccaaacaaagaaatggatcaaatgtttgcattgatgtcgattgcgattttatttgtacttctggatcaaaaggaccgatgtgtgtttgtggagatggatctcaagtcgagccaggcaatatttgtgatgatgctggtcatagaaaattgcctgtttttaaagacttagattacaaaaaaaatatgatttcaatctatatttctatatttttaattgtaatgttgttattagcgatgttatattattttctattctattccaaaaataaatctttgaatcaactagtatctagattatttcatcggccattaacaactgtcatccaagtaattgaccagaaagaagatgaaataaattcaagatataatgtttatgagaatcctatgaacgaagatgggttaataaaagaccatgcttgtggaagtgaaatcgtcttgaactatgatagtgcacgttacgttaatgctaactgctcagaacctccacttaactcgttttcagagtacgacgagaacgagaaaaaaaaacttattatggttttataa

SEQ ID NO: 28 - DNA, 5772 bp, Acyrthosiphon pisum
attgaatgttttttcagaaaaagaatgtactaaatacgaattcaactgcgggaacggtacttgtatcaataagacaagactttgtgacggcattgttgactgtatggacaatggcgctgacgaagacgattgtgatattagcaaaaagccttgcctggcgccagaatactttgaatgtgataacaagagaaaatgcattcctaaggaatttgtgtgtgataagtcgaatgaatgcatcgacaagtctgacgaaagtcattgtaaagagacgtcatcatctttaacgcagtcatgccgggaaggaaaattcaaatgctccgatggcacttgtattccaatggcttggcattgtgacgcggagattgattgccacgacggtagcgatgaagacggagaaaaatgtagatacacgacattgtgtacctctggttatatgtgcaaaaacttcaattgcgtttcaaagacgtggagatgtgacggaaaagatgactgtggagatggttcagacgaaacccattgcgatatccaactggttgagccagaaaaatgtttaattgaaaatcgtaaatttctatgtcacgatcataaaaaatgtatcgatgtcagaaatgtctgtgattacaacaatgactgtcttgatgcatcggacgaaggtggtctttgcaataataaaactgatttcaaaagtgaatgtaattcgatgaattgttctgccgcatttgaatgtttaagaaagccacatggcattatgtgtgtgtgcccaaaaggaatgcattatttaaataataaatgttctgatatcaacgaatgtgaacaatatggtatttgtgaccaagtgtgtcttaatttggaaggttcatatacgtgctcctgtgatccacattatgaactagtagataatcataagtgtaaaataaaaggcctaaatccggaattattatattcatcactacgtcaaataaaagtttttaacttggaattacttcatagttttactttgattgatgatttgcaacatgtcactggattagctgttgataaattaactttatactggacactttatttggatgggaactcagctattgttagagcaaacaagtctgagcctaaaccagaaattattgttgactcgggtcttggatcgcctgagaatctagttatagatattattacacataatttgtacttcaccgatgcaaaaatgaaacatattggagtgtgcaataatgatggttcagtatgtacagttcttcataataaaaacatagacaaaccaagagcagtagctgtttcaccactagatggtctcatgtactggacagattggggtaaaaatccaatgattggtcgttctggtatggacgggtcaagaccacaaccgtttgttacacaaaatatacactggccaaatggtgttcatgttgattatgtcgggaaaagaatttactgggtggatgctaagatgcaatttattgaatccattaatttagatgcaactgatcgaagagtaattgtaacagaatatgtagatcatccatattcggttactgtgttcgaggataaattgtactggagtgattggtcaagtaaagaaataaaagtatgcaacaaatttacgggtaaagatagcaagacattgatacgtgaaaataagaacagagtgtatggcatgcaaattaaccatccctcgctcttcgagtctcaaatgccaaatccttgtgaacaaggaaaatgcagtgatatatgcttattagcaccgaaaacagaaatcaattctaaaggatactcgtgcgcttgccccgatgataaaaaactatcggaagatggaatcttttgtatcaccattgccatacctcctacgcttattgtgggtacaccaacaagtattatagaaattgagcaggaacatttaggccgccaaaaagcaaaaaaaatatcgttgaaaaatgatatatctagcatatccgcattgacttataattcattatctggtgacatcatcatctatgactcaaggtctaagaaattattcactttcgattttgttaagatgaaattatcagatttagatgtaccagaaattagttccatttattctcttgaattcgacaatcatggaaacaatttatactggtgtgataggactagaaaaacattagatgtgttaagtctctctacaaaaacacacacaacgatattcaaagaaattgaaggtcatatcccatttgccgttactttagttccagataaaagctttatgtttgtagctatgaaagaaggttcacacatacatatcgatcgaattgacatggatggaagtattcagtctctagtacatatggtggagtatggattgacaggagatgaaattgctttacattttgatatgattacaagactgttgtattttactgactataaaaatggcattattgatagtgtcagcgaagatggaacggatagaagaattataaaaaaagcaggatttgtaagagatattgtttcaattggttatgacattgtttgggtatctgaaggttcgaaaattttaaactggattgataacgttgatgaagaccgagcatctagagctcttgatatagataattggaaaactgattcaaatttatatttaaccgtagcaaatggaattcacaaaaatatacaacacccgtgtcaacaaaataatggtggttgtagtcatatatgccttttatctgagaaaggaaaggtttgtggttgtccacctggattagttttatcaaacaacagcctgaattgtacatcactaggagagtgtaaatctgatgaatatcgttgttacactggtgaatgtatttcatctcattcccgatgtgattttataaaagattgtcctcgtggtgacgatgaagacgttgttaaatgtttgcattacacaccaaactcatgtccacaatctcaatttttatgtcatgataaaacaaagtgcttggataaaaaacatatgtgtgatagtattaaagactgtagtgatggttcagatgaaatggattgtttacacaagcacacttgtgattcaactacagaatatcagtgtacatctggagagtgtattcagcgcatatttttatgtgatggtaatcccgactgtattaatggacaagacgagttaaattgtctgaaccaaagttgtaataatattacagaatttagatgtaattctggaaactgtatacctgcaacatgggaatgcgatggtgaggttgattgttttgatggttcggatgaacactattcatgtgctaccaaaaaatgtaaagatgatcagttttcttgcaccaatggtcgatgtatatcacataaattcacttgtaacggtaaagatgattgtggtgatagttctgatgaaaatggttgttcgtcaaatcatgcatacatgacaaaaagagtttcaaaagtatgtaatgaaaaaacagaatttgaatgtgaaaacacaatgggacattgtataccgatcaaggctaggtgcaacggcacatccgagtgcaaacatttagaggacgaattgaattgtggatgtcaaaaatctaattttttcgaatgtcagaataagcgttgtgtgttaaaagattggttatgtgataaacatgatgattgtggcgatgggtcagatgaaagtcaaaaggcgtgtgatatgctttctgaacatttatcgaattcagtcgtttcatcaaaagactgtgatggatatttatgtaagaaccaagaatgtatacctctagatcaagcttgtaataagaaaatcaattgtaaagatggttcagacgaaggagatctttgtggtttatcttgtatacacatggattgtagtcatacttgtcaagaaactccaaaaggtgggaaatgtacatgttatcatggctataaacttgcacaagatggtataacttgcagagatattaatgaatgtgaagacgacaatttatgtactcaatattgtacaaattcagatggttcatatagctgtagttgtttaaattctgattacattttgcgtgcagataaaagttcctgtaaagcaattggacccacaatggatttagtttattcgagtgttgatgaaataagaagtacttcaggagatattaaggaatcaaaattaattttttcgatgcctggaatgacaatatcgagccttgatatagatattagaagaaatcttatttattggacatcaaaacaagctggtgttcttatttgtatggatatgcaacaacagcataaattttacatgacagatttgttacacccaactttagttcgtattgattggttaacagaaaacgtttactttgtacaaaattttaaagatattgttgtatgttatttaaatgctaaacgttgtgccactatatacagtgcaaacatccatacaacaattatggcttttgaaattgatcctcgttccggagtgatgttctggtcggaaaccatatgggcagtattttcaacaccaacaactattattaggaaatctgattgcagtggatacaatgtaaaaactataatccatcaagggttacagtatgttactgatttagctatagatccaatcaaacatatggtctattgggtcgatcaagttaattcaacaatcgagaggtctaattacgacggaactaaaataactgtgttggtcaattcgatagaacatttgccagagaaaatatcattgtacgaagacaaactgttttggaccaaccatgaaaccgggttgtctatatttaaatgtaaagttctcggttctgaaaatgtccactgtgagtctgttcctgttcaagtgtttgctaccatcgagacattcacgataagtcaacaggccaaacaaagaaatggatcaaatgtttgcattgatgtcgattgcgattttatttgtacttctggatcaaaaggaccgatgtgtgtttgtggagatggatctcaagtcgagccaggcaatatttgtgatgatgctggtcatagaaaattgcctgtttttaaagacttagattacaaaaaaaatatgatttcaatctatatttctatatttttaattgtaatgttgttattagcgatgttatattattttctattctattccaaaaataaatctttgaatcaactagtatctagattatttcatcggccattaacaactgtcatccaagtaattgaccagaaagaagatgaaataaattcaagatataatgtttatgagaatcctatgaacgaagatgggttaataaaagaccatgcttgtggaagtgaaatcgtcttgaactatgatagtgcacgttacgttaatgctaactgctcagaacctccacttaactcgttttcagagtacgacgagaacgagaaaaaaaaacttattatggttttataagcatcataaaattataaactttgttaaggatgaatatttatttgttaatttttatttttataaatacaattttattttatttttataatatcaatatgcacattgcacatagatataaattattactgaaatttataattctgtatacctaaatgattattttttttagtttgttaacttttacaatagttccttatttttaatttgtttaattcaaagttacccggtatatatatattattataataataaataaaagttacattaaattagtgtgattgtgtcaatatatcaaaagctaacacttaatataattcaatgtatattcaaaagatctgcgtgtgtaatgaaattaaatatat

SEQ ID NO: 29 - DNA, 5430 bp, Bemisia tabaci
atgattcagagggaatggagctccatatccaagggctcatggtgcacagcattattagtagttatcgcagtcttttgcacatttgtacaatcatcttcatcatatgaatgtgtcggaccatcccatttcgaatgtacaaatcacaggtgtatatccatggatttaaggtgcgatggagatgacgattgtaatgatggatccgatgaacacggttgtaatgtggataaatcaaaaaatgaaacctgtgctagtacccagtttgattgcggtcagggccaatgtataccacggtcctgggtttgtgatgggaatgcagattgtgaggacggtaaagatgaaggagctgtaggctgcgctgaaagccattgcgcagcgtctgagtgggagtgccctcataaccatcgctgtatcccgaatgattatatctgtgatggggatgatgattgtggtgacaattcagatgaagacgactgtacaggcaagaataattttacagagtgcacttcagcgtttggaaaatttctctgcaaaaataggaatcagtgcatcgatgattctcttctgtgcaacgggcaccctgactgtaaagatgggtcagatgagggtggtcactgtgcttcgaaagctcaagtagctactgactgtgcaaagctaaactgtacccactcgtgtgttgaaagcccagatggaccggtttgcgtctgtggatcaggatatcaccttgaaggaaacgtctgtgaagatattaatgagtgcttggaatggggaacatgtgaccaaatgtgtgaaaacacggtcggaggttacatctgtgaatgtgaacctggatacaaactggaaagtaacggacgcacatgcaaagcagaagagggtgaaggacttctgatctattcaagcctcaaaaagattaagtctctatatctgacatctcgcatatcaatgacagttgcctctgaggttccatatgcgacaggtgtgtcttttgatggtaaacatgtctattggacgaccgtgcttgatggagttgaatctattgttcgggcaagtgaggatggatctcatgaaaccaccattgttgattcaggtgttggctcccctgaagacctagctgtcgactgggtgactggtaacatatacttcactgatggcgagtaccaacagatcggcatttgcacctacaacgaagagctggttgaaacgaaatgcgctgtcctccacaacaaagacctgaacaagccccgcgcaattgttttaaacccagctgatgcggtcatgtactggtctgattggggctttaaaccactcatcgcccgttctggaatggatggcacagacttctatgagtttgtaacgacagagctccattggcccaatggtctcacaattgatcacggaaatcggagagtatattgggtcgatgcgagactcggaactgttgaaactgttgattttcaaggccgtgatcggcggaaaatattaactgatctcaatgatcatcctttcgcaatcgctgtttttgaagataaaatctattggagtggatggacaaaccaagaaatagtagaatgtaataagttcaccgggaaaaaccgagtacaagttgtcaaaagtcggaaagacaaaatttacggtgtgcacatttttcacccaactttgcaaaatcattcgctaccaaatccgtgcgccgggaagtgcagtgacatctgtgctctatctccatcagcttcaagcggaggcaaaggctactcttgcttgtgccctgacaataaaatcttatccccctctggagaatggtgccaagaacagcccaaagaatctgtcattgttagcattggaaactttgttttccagctgaaagtgactcttgggaagcagtacattcatccgctgcctgttaataacctccagtctgtcagtgcaatcgtctacaactcctttgatggctctctattaatagctgacccagatgccaaaatgatttactcgtatcaactgaacacggacaccatggagactctaattgatctcaaagtgggctatgtctcagcattggcttacgatcccattggccggaatctctattggtgcgacaaagaggccggcactgtagaagtgttcagtttcttctctcacagaaggaagttgttgctccgggaatttgacgatgaaaaacctttcgccatgactctcataccagaagaaggcctgatgttcgtcattgccaaagcccatgaccaccttcacattgatcggatcaacatggatggctcactaagcacactgactcacatgaccagtctcaagttgcaaggaccggatgtagctttgcactatgacagtgattctcgcagggtttattgggctgatcactcagctggcctcattgagagcaccgatacgaatggaaacgacaggcaagtataccgtgacgtatcatcacctttagctctgaccgatgtggatagagacctttattggacatcagatggtcgcccacacctgtactactctgagaaaagcaatgcaagcatgcccgtcaggaaaatcaacatggaacgatttttgcgatcaccaaaggaccactatcggatgtttgttactgcaatcatccctgataaaactactagagatcatccttgccaaactaacaatggcaagtgtagccatttttgcctcctcaccagtcgtaatccaaagcatgtatgcagttgtcctgatgggatgaagctggcggataatggtcaggactgtgaagagattgctgcatgtggagcacatgaataccattgcacgacaggtgaatgcattccaatgtcgaagaaatgcgaccgaaacaaggattgcccctatggcgaagatgagaccttctgcccagcacagtgtgagactgatcagtttgcgtgctttgatggacaaaaatgtatcgatgccaaggatagatgcaacatgcattttgattgtcacgaccactctgatgaggctaactgccaaaatgtcacctgcgatcaatcatacaactttttgtgccgaatcggtgagtgcgtaagtcacgctgtgctgtgcaataatgaatggaattgcaaggacggtagtgatgaagagaactgtacgacttccacgtgcccttccagcgagtttcggtgtcattccggaacatgcataccgaagaactgggtctgtgatctggatgccgattgccccgaccaatcagatgaaaataactgcagtttctcaagaaaagaaaagtgcaccgaattcttgtgtcagagtggcatgtgtgtagcacaggaacttgtctgtaacggtcaaaccgaatgtgacgatggaagtgacgaattcaattgcgatgagccggttccaaaaacggcaaacaaagaggatggttttatagataactgtgatgaagagaaggagttcatgtgcgagcctggcaaatgcattaatcttatattcaagtgtaatggtgttaaagattgcgagaacggagctgatgagctaaactgcataggctgtgaacaattcacttgcaataatgggaaatgcatcacttatgatcttgtatgcaatgatgatgatgactgtggtgactcatccgatgaaagacctctcaactcgtgcccagacagcaaagaaaacccagctattgtgcctgctcatattcccaatgtgtgccatggatttgtttgcaagaacggtgaatgccttgatgatttcagtctagtctgcaacaaaaagcaagattgtaaggacggctcagatgaaggtggacgatgcggttcaagctgtgatgtgacagcaaattgcagtcagatttgtcgtgataagccaaatggacatgagtgtgcgtgtgtccctggctttaaaattgctgaggatggccgcgattgcgaggatattgatgagtgcaccgaattggagccgtgtagccagatgtgtttcaacacctatggaagttacacctgtgcctgtcttggtccagattatattaaaaagtcagatgggtcctgcaaagccactggcccaaaattgcagtacgtctttgctaccggttaccagattcgcactatatcatacctaatgaccgatgtcaaagtggcatactatagtgcagatcttgaagtttcaggatttgatgtgaacatgagaacagagcatgtctactggtcatctgaaaacaagggtgtcatcacaaaaatgtcattaacgcacagacacgagccaaaacatttcatcactggtttacgccgtccatcagagctggcagtcgattggataacacacaacctctactttgtccaagcaaggaacatcattaatgtctgtaacttccaccttgaacgctgcgcacaaattttgaccgctgaaagtggcttggagatcaacagtcttgccgttgatcctgtcagaggtgtccttttctggagtgaaacaagccgcatcgtctggaatatgcctaagagctccattagacgcgcagacatgaatggaaaaaatattgagaccattgtttcagctaatgtgagctacgcattggatcttgctttagatccaatcctcaatcatgtctattgggtcgacaaaacattgaaggtcattgaaagagctaactatgatggaactcgccgacgtgtcatcttgacatcaaagttccatccaaaatctgttgcgctctttgatggttctatctactggtcggttgagtcgagtggatccccgattacaaagtgtgctcttcaaggactttccacggaatcgtactcgtgcaatcaaatcccaatcaaagttgtagatccaataactcacttcactctcatgcaaccagctctgcaaagaaacatatcaaacgcttgtaggaacatggagtgcagtcacatgtgcgttctcagctcgacattaccatcatgcatttgtcgcaatggaaagatagttcctccaaaaacagcctgtacggatagcaattatatgccagaaacccactttttggaaacaactggaactgttgatggtcaaagtcctggatattcttggtcatcaatctgtgcaacaatcatcttagtcgctttcatcggaacaactttctatgccttattctactactataactccaagtacaacatgcgacgtctatttccatcaattcattttaaaaatccagccttcaacctacagtcaaaattccaggctaatgggatgaccggtttagccagtggcaaccatatggctcacttgtcatcgaaggaccatcatttcgaaaaccctctgcaagagagtcgtgaaggtgaagtgagaatcgttactccaaatgaaatcacgattagccgagccgagaccagttggacatcagcccatctagaagactcaagctctatagaaacagaatacgcagaccttgttgtcgagacaaaccccaaagctaatttgatatcgtga

SEQ ID NO: 30 - DNA, 5774 bp, Bemisia tabaci
atgattcagagggaatggagctccatatccaagggctcatggtgcacagcattattagtagttatcgcagtcttttgcacatttgtacaatcatcttcatcatatgaatgtgtcggaccatcccatttcgaatgtacaaatcacaggtgtatatccatggatttaaggtgcgatggagatgacgattgtaatgatggatccgatgaacacggttgtaatgtggataaatcaaaaaatgaaacctgtgctagtacccagtttgattgcggtcagggccaatgtataccacggtcctgggtttgtgatgggaatgcagattgtgaggacggtaaagatgaaggagctgtaggctgcgctgaaagccattgcgcagcgtctgagtgggagtgccctcataaccatcgctgtatcccgaatgattatatctgtgatggggatgatgattgtggtgacaattcagatgaagacgactgtacaggcaagaataattttacagagtgcacttcagcgtttggaaaatttctctgcaaaaataggaatcagtgcatcgatgattctcttctgtgcaacgggcaccctgactgtaaagatgggtcagatgagggtggtcactgtgcttcgaaagctcaagtagctactgactgtgcaaagctaaactgtacccactcgtgtgttgaaagcccagatggaccggtttgcgtctgtggatcaggatatcaccttgaaggaaacgtctgtgaagatattaatgagtgcttggaatggggaacatgtgaccaaatgtgtgaaaacacggtcggaggttacatctgtgaatgtgaacctggatacaaactggaaagtaacggacgcacatgcaaagcagaagagggtgaaggacttctgatctattcaagcctcaaaaagattaagtctctatatctgacatctcgcatatcaatgacagttgcctctgaggttccatatgcgacaggtgtgtcttttgatggtaaacatgtctattggacgaccgtgcttgatggagttgaatctattgttcgggcaagtgaggatggatctcatgaaaccaccattgttgattcaggtgttggctcccctgaagacctagctgtcgactgggtgactggtaacatatacttcactgatggcgagtaccaacagatcggcatttgcacctacaacgaagagctggttgaaacgaaatgcgctgtcctccacaacaaagacctgaacaagccccgcgcaattgttttaaacccagctgatgcggtcatgtactggtctgattggggctttaaaccactcatcgcccgttctggaatggatggcacagacttctatgagtttgtaacgacagagctccattggcccaatggtctcacaattgatcacggaaatcggagagtatattgggtcgatgcgagactcggaactgttgaaactgttgattttcaaggccgtgatcggcggaaaatattaactgatctcaatgatcatcctttcgcaatcgctgtttttgaagataaaatctattggagtggatggacaaaccaagaaatagtagaatgtaataagttcaccgggaaaaaccgagtacaagttgtcaaaagtcggaaagacaaaatttacggtgtgcacatttttcacccaactttgcaaaatcattcgctaccaaatccgtgcgccgggaagtgcagtgacatctgtgctctatctccatcagcttcaagcggaggcaaaggctactcttgcttgtgccctgacaataaaatcttatccccctctggagaatggtgccaagaacagcccaaagaatctgtcattgttagcattggaaactttgttttccagctgaaagtgactcttgggaagcagtacattcatccgctgcctgttaataacctccagtctgtcagtgcaatcgtctacaactcctttgatggctctctattaatagctgacccagatgccaaaatgatttactcgtatcaactgaacacggacaccatggagactctaattgatctcaaagtgggctatgtctcagcattggcttacgatcccattggccggaatctctattggtgcgacaaagaggccggcactgtagaagtgttcagtttcttctctcacagaaggaagttgttgctccgggaatttgacgatgaaaaacctttcgccatgactctcataccagaagaaggcctgatgttcgtcattgccaaagcccatgaccaccttcacattgatcggatcaacatggatggctcactaagcacactgactcacatgaccagtctcaagttgcaaggaccggatgtagctttgcactatgacagtgattctcgcagggtttattgggctgatcactcagctggcctcattgagagcaccgatacgaatggaaacgacaggcaagtataccgtgacgtatcatcacctttagctctgaccgatgtggatagagacctttattggacatcagatggtcgcccacacctgtactactctgagaaaagcaatgcaagcatgcccgtcaggaaaatcaacatggaacgatttttgcgatcaccaaaggaccactatcggatgtttgttactgcaatcatccctgataaaactactagagatcatccttgccaaactaacaatggcaagtgtagccatttttgcctcctcaccagtcgtaatccaaagcatgtatgcagttgtcctgatgggatgaagctggcggataatggtcaggactgtgaagagattgctgcatgtggagcacatgaataccattgcacgacaggtgaatgcattccaatgtcgaagaaatgcgaccgaaacaaggattgcccctatggcgaagatgagaccttctgcccagcacagtgtgagactgatcagtttgcgtgctttgatggacaaaaatgtatcgatgccaaggatagatgcaacatgcattttgattgtcacgaccactctgatgaggctaactgccaaaatgtcacctgcgatcaatcatacaactttttgtgccgaatcggtgagtgcgtaagtcacgctgtgctgtgcaataatgaatggaattgcaaggacggtagtgatgaagagaactgtacgacttccacgtgcccttccagcgagtttcggtgtcattccggaacatgcataccgaagaactgggtctgtgatctggatgccgattgccccgaccaatcagatgaaaataactgcagtttctcaagaaaagaaaagtgcaccgaattcttgtgtcagagtggcatgtgtgtagcacaggaacttgtctgtaacggtcaaaccgaatgtgacgatggaagtgacgaattcaattgcgatgagccggttccaaaaacggcaaacaaagaggatggttttatagataactgtgatgaagagaaggagttcatgtgcgagcctggcaaatgcattaatcttatattcaagtgtaatggtgttaaagattgcgagaacggagctgatgagctaaactgcataggctgtgaacaattcacttgcaataatgggaaatgcatcacttatgatcttgtatgcaatgatgatgatgactgtggtgactcatccgatgaaagacctctcaactcgtgcccagacagcaaagaaaacccagctattgtgcctgctcatattcccaatgtgtgccatggatttgtttgcaagaacggtgaatgccttgatgatttcagtctagtctgcaacaaaaagcaagattgtaaggacggctcagatgaaggtggacgatgcggttcaagctgtgatgtgacagcaaattgcagtcagatttgtcgtgataagccaaatggacatgagtgtgcgtgtgtccctggctttaaaattgctgaggatggccgcgattgcgaggatattgatgagtgcaccgaattggagccgtgtagccagatgtgtttcaacacctatggaagttacacctgtgcctgtcttggtccagattatattaaaaagtcagatgggtcctgcaaagccactggcccaaaattgcagtacgtctttgctaccggttaccagattcgcactatatcatacctaatgaccgatgtcaaagtggcatactatagtgcagatcttgaagtttcaggatttgatgtgaacatgagaacagagcatgtctactggtcatctgaaaacaagggtgtcatcacaaaaatgtcattaacgcacagacacgagccaaaacatttcatcactggtttacgccgtccatcagagctggcagtcgattggataacacacaacctctactttgtccaagcaaggaacatcattaatgtctgtaacttccaccttgaacgctgcgcacaaattttgaccgctgaaagtggcttggagatcaacagtcttgccgttgatcctgtcagaggtgtccttttctggagtgaaacaagccgcatcgtctggaatatgcctaagagctccattagacgcgcagacatgaatggaaaaaatattgagaccattgtttcagctaatgtgagctacgcattggatcttgctttagatccaatcctcaatcatgtctattgggtcgacaaaacattgaaggtcattgaaagagctaactatgatggaactcgccgacgtgtcatcttgacatcaaagttccatccaaaatctgttgcgctctttgatggttctatctactggtcggttgagtcgagtggatccccgattacaaagtgtgctcttcaaggactttccacggaatcgtactcgtgcaatcaaatcccaatcaaagttgtagatccaataactcacttcactctcatgcaaccagctctgcaaagaaacatatcaaacgcttgtaggaacatggagtgcagtcacatgtgcgttctcagctcgacattaccatcatgcatttgtcgcaatggaaagatagttcctccaaaaacagcctgtacggatagcaattatatgccagaaacccactttttggaaacaactggaactgttgatggtcaaagtcctggatattcttggtcatcaatctgtgcaacaatcatcttagtcgctttcatcggaacaactttctatgccttattctactactataactccaagtacaacatgcgacgtctatttccatcaattcattttaaaaatccagccttcaacctacagtcaaaattccaggctaatgggatgaccggtttagccagtggcaaccatatggctcacttgtcatcgaaggaccatcatttcgaaaaccctctgcaagagagtcgtgaaggtgaagtgagaatcgttactccaaatgaaatcacgattagccgagccgagaccagttggacatcagcccatctagaagactcaagctctatagaaacagaatacgcagaccttgttgtcgagacaaaccccaaagctaatttgatatcgtgatactctttaatcatttgaaaaatgcagtcgtgtaaatatgttgtacagtttgttttttgttgaatcttttaatttatctatgcatttgttgtttgtataaatttttattaccatattttggtgtcttcggaactgaagtcagtcaaatttatcgagtcaaatttcatatcgatcagatcagtttatggtgtttttatatttgtttaaagaagattgatccatttttatcaaaagcatctgtcaattatcttccttagaaaaatgatacaatctaaattttttcaaatttataatacaaggaaaaaaaaaaaacctatagtgaaatcactagtggaggatccgcg

SEQ ID NO: 31 - DNA, 5370 bp, Spodoptera litura
atgaggaaatatagtaacaaaatgaagtatcaaggcttgctattgatagttagtgtggcgtggtgttcagctcagctcagcgatgacatgcagatgtttgacccagaatacatggcggaagacaagttcccctgcatgggtggaggatgtatttcagtgtcacagtactgcgatggaaaattggactgtgatgatggcagcgacgagaatttttgcatcgaacacaagccgttccaggagttttgtaacgagatccaccagtacatgtgtcgggactccacgaagtgtgttcctttatcctggctgtgcaacaatgagccggactgcgatgatggcagcgatgagttcaactgcaccgcactgccggctgtaaacgtcaattcgacatgcaaaggcttccaatgtggagacggcaaatgcatctccttcctgtgggtgtgtgacggtgtctacgactgtgaagataaaagcgatgagtatgctgaggaactctgcaggcacgtatcccgtccccacgcgatcgtcgacggttcatactgtcaggaattgcacacaatggacgaccgtaactacaagtgtctggacgcctccttctgcctgcccagcagtatgatgtgcgacggactccaggattgccgcgatggcagcgatgagggaccattttgcaaaaactggaatacaatgtgcgacaacttcaaatgcatgggtaacgacacgatatgttccccggagaggtttggagcctcctgcctctgcctgccctcccacttcatgcggcaatacgattacatcaccaaacagtgccaggatgtcaacgagtgcctcatggagcacccaccctgctcccataaatgcattaacgccgatggccattatatttgtgaatgcgatcctggatacaaacgggatgtgtatggatatctttgttatgctactggtcccgaagcgatgctgttcttcaatactcggaacgatatcagatacctgaagattaagactaaagaaatggtcacagtggctaccgacatcaaagagggtcatggcgtttcattcgacgggacttacatttattgggtggagacagcacagggacatcagtccatcttcaaagcacaactcggagacgtcaaggatacaaaggaggtactggtaggtctcggtctggaggaccctggcgacatagcagtggactacctgggcgggaacatatacttcagtgatgcggagcgaggaatcatctccgcttgcagggtcgacggctccatctgcaccacgatcaagactcatgctaacaacccacgatttgtcactcttgatcctaaaaatggtaagatgtactgggcagactggcacgagcgtccagtgataatgtcagctcggatggacggcagccgacacgatgagctggtggacaacttggagaactttgccaccggcctggccgtggacgcgccaaacgggagactgtacttcgttgacaaaactatcaaagtcgtcatgattgcggagaaacatgtttatgctttatttgaagagcccttccaccatccgtactccatctcagtgttcgagaacactgtgttctggagtgactggacctccaacagtatacagacgactgacaaagtgcacgggaccgcgcagaagaggaatgttctactcaaacttgatacacctgtactaggcatgcacatgtaccatccagtgctgatgaacacgacatcgaacccgtgcagcaacaacaactgctcgcatctctgcttcgtcacctccaacgccacccacgtctgcgcctgccccgatggcatggagattgagaataatcagtgccatcacgtaggcaactaccgcgccaagtacctggtggtgggaagtgggcagctgttcacaaagatccagtacaacgcgctcggcaacccggagtgtcacgccacgcacttcgaaatcggacgcgtgcaggccatggcgtacgatcggtatagagattcactattcatatacgacggccagcgacggaccatcaactacataaacatgagtgacttcactctcggtatcactcacgtgttgatctacaacggactggagaacgtcgtcgacatggattatgattacgtgacagataacctgtacgtgctggatgcaagtcgtcgtgtcgttgaagctgtgtctctgaggactcagaagcgcgccatagtacatcgattcgacattcaagaactgcctgttagcttctgtattctttcggactacgggagaatgttggtggccgtggtggagagtgagatgcacaacaccattcatatcgacagcatcgggctcgacgggacccaacggagacacgtcatcatgaacaatttgaaaggtcctcatattcgattgcggtacgtgccagattttattgggcgcgactggacccaacggagacacgtcatcatgaacaatttgaaaggtcctcatattcgattgcggtacgtgccagaaactgagcaggtgttcatatccgacgagagcaacggcatcatcgatttcatacatcctgaaggcaccgggcgggagaactatcgggagctgacctcgacggtgaccagcctcgccatagcagataactacgtcttctggacagaccgaaagacccccagactcttctggtctgacatacacgaagcctcgccgaagataaggaggattgatctggcacttttcccaaacactacgcaacttctgatccaagcaacgaactcgctccctgatccaaaagaccctcttctgaaccatccctgtctaaagaatccttgttctgacgtctgtgtccaacttccccatgatactccagaagatcacccgaaactagcaaacttcgagatgaagtacaagtgtttgtgtcctcctgggttgttggtgaatggtaaccagtgcgccaaacctgcgacatgtggttcggatgagatactgtgccataggagtaatatttgtgtgaagcaagatgccaggtgtgatggaaaggccgactgtccgaagaatgaagacgaggaaggttgtatagtggatccggcaaacatatgttcatcagacgaaatattctgtcgcggcttgtgcgtaaacagggacaaagccacgacgtgttctaccggagaaaaaactaataaagcactaccttcgaacaactgcagcagcacagaattccagtgcacggacacctcaatctgcatctctcggtcgcaggtctgtgaccaacacatcgactgtcctaatggatcggatgagcagctcttagagtgcgacatctactcttgtcatgaaactgagttcatgtgtgcgtccggctcatgtatagtgaaaacgtggacatgtgatggagaccgtgactgtaatgatggatctgatgaaatcaactgcgtgaacatgacttgcggcctgggcttctaccagtgcagagacagggagtgcgtggagttatcgaagaggtgtgacggacatcgggattgctcggattactccgacgaagaggactgtgatgagcctcaaattgtcgagacgatagaagaagccccgaaatgtgctgcgtgggaatatacttgtgaaaaaaatactagcatttgtttgcctgaaaccgctcgatgcaacatgaagacggactgcccgggtggcacggatgagcacggttgcgaccaccgctgtgccccgaagggaatgtttgcgtgcggccaacaggtcacttgtatcacaatgaacaaggtctgcaacggacgactggattgtgatgacggatccgatgagacgcctgatgcttgttctcaggtgaacaggacctctcacctgttcccagtagctcggacattcactgaatgtactgagggttataagtgtaacaacggacagtgcattgagtggtcacagttgtgtgacaagaagagggactgcatcgatgggacagatgaaaatggactttgcgatactgcatgcgcaaacagcacatgtacgttcatgtgtcagccgaccccattcggacgtcgctgtctgtgcccctttggcttccaaatttccaaggatcagttctcgtgcgaggacatcgacgagtgcactgaagatgtctgctctcaagggtgtatcaacgtgccagggtccttcctgtgctggtgccatcatggttatgccatcaggaggacagaccgtcgctattgcaaggcgatccgcggcaacatgtcgatcctgtacgtgtcgggtaacaccgtgcggtctatctcagcagacgggtacggtgctatcgagtataccgatactaatgcctcggccatcactgatatggattataatgttcggcagaagaagctatacgtgacctcggaagcgggtggcaagttgttagaagtgaatgagacgcagaatgtgatcgctgttacgaacgttgggaaaccatcgagggtggcagtggactgggtgaccggcaacgtgtacttcgtggacacgacgccatttgaccagcgcatacgagtctgtcatgtcaagaggaagcgctgcgcttccctgctgaaacttccttctgatgccacggtgacagcgttgatagtagagcccagttccagccgcatgttctactgcgtcactcggaagctggagtcggtgatctggacagcgaacctggctggcagacacgtgacggatctggctactgtacggaactgcaccggtctggccgcagactccttcaagaagaagctgtacgtcgcagagacgggcccagcgcatattattaggatggattatgagggggagaatttcaacaaaatcctctcagatcacccacgtctgcaagcaccgcatggactagaaatattcgaagactacatctactacttggaagccaactcgttccgcctcagccgctgccagctgtacggggccaaacattgtgaaacttatgtgtaccgtgtgtttgacgccaacacgttcgtcattcgccacgagagcatccaacgcgatgacatagtcaacgaatgtgaagatgtcgtttgtgacaacatttgtgccgtggacgaagatgggcccaaatgtttgtgtgacgatggagccttggccaagagtgggaagtgtcctgtggttgataagaaattggtacctttattcaacggctggtcgtacgagcagctggcatcggctcgcagcatccccttcaccgtcaccttgggagtactgaccctgatcgccatctacctctgcgtcttcgtatactaccattgtatatacatacccaggaagagaatgttagcatctgcttacactgaagttcggttccagaacacacaaaatacgtcctatcctgaatcagacccggtagtggagatgcatccctcaaggtatctaccttag

SEQ ID NO: 32 - DNA, 5370 bp, Spodoptera litura; identical to SEQ ID NO: 31

SEQ ID NO: 33 - DNA, 5341 bp, Phyllotreta cruciferae
tcagcagttttcgcacccgaaggaaattgcacctccgaccagttccaatgctccgaccagcgatgcataaactttaaagccagatgcgactcaaaactggattgcccggacggatcggacgaattagaatgcgatctgcatcgctgcgatgagccggagttcttccgctgtaaaaataacagatgcatcagtcacgctttcgtctgcgataaacagaacgattgcgaggacttctccgacgaggcgaactgcgacagcttccagtctttggtgtcttcggcttgcgaagagggccactggaagtgcgccgacaaattgtgcatacccaacgattgggtgtgcgacggcacgccggaatgcatcgacggatccgacgagaccatcggctgcagcacccagatcgcctgcgacgggttccgctgcaagaacaagcactgcgtgcccaaagagtgggtctgcgacaaccacaacgattgcatcgataacagcgacgaggaggactgcgagaaccacatccccatcgaccagtgcacgctggacaagcgcaagttcctctgccacaacaacgtgacttgcattgacaccgagtcggtttgcgatggagtcaataattgtccagacaattcggacgaatccctgcaatgtaacgcgtcagtgaaggcttgcaaaggcgatcaccagtgctcgcacgtttgcatcccgctgcccgaaggccccaagtgcgtctgtcccgcggggtaccacacgctcgacgagaaaaactgcgaggatatcaacgaatgcgaaacatacggtatatgcgatcaaatgtgccggaacacgccgggttcgtacgaatgctactgcgacaaggcgtaccgtttggcggaggacaagaaaacctgcaaggcggagggcgaggtgggcatcatggtgttcagctcgaaggatcaaatcagagcggtggcgctggattcgaccagctacatcatcgtcgccaagaacttgaagaaagtggtgggcgtcgatttcgacggtcgccgggtctactggacggagatatacgggggatacgagaacatcgccaggagcgccgaggacgggtctcagaaggaggtgttagtaacggctggcgtagatctaccagaggatttgtccatcgattggttgacgggtaacatttatttcaccgatggcgagaagcagcacatcggagtttgctcgccggacgggacccattgcgctgttttaatcaataaggacatcaggaaacccagagggatcgttcttaacgtggtggacggcgacatgtactggacggattgggaagatccggcgcgaatcggttactcgctaatggacggatcaaatgataagcctttcgtggaaaaagacatacattggcccaacggtttagcattggatcatcctaatagtagattgtactggacggatgctaggaagatgacattggagagcatacgtttagatggaactgatcgaaggataatattagaagacatcgtgaagcatccgtacgccatagcagtattcgaggataaattgtactggtcggattgggcgacgcgaaccatccaacagtgcgacaaattcgacgggaagaaccacaaaacgttgatcgaagagaaagagctcatctacgggatcagcatattccattcggcgcagcagaagcgcagcaaaaacccctgcgagatggcgctgtgcagcgacttgtgcttactgaaaggtacatcgtacagctgcgcttgtccacagaacaaggtcttacaatccgacgggcttttttgtaaagaattatcgcctacagaaactcttatcgccgctcatcgggatatgctagtacatatagagcatccgattcttggtaggcatgttgttacagctctacccggcgccactgcagacatagaaagcatgacattcgacagctataagaatgtactgtacgtcagcgacttcaagaccaggaggatcagtactttgcacatgaagaccggtagtagcaaagttatggacatttccgatttgggtagaatcagcgctatggatttcgattctaaaagcaacaatctttacatctgcgattcggtacgcaaagtggtggaagtaatcagtctcaacacgatggcaaggcggattttaatccacgacacgttcggagaaatcccccaaagtatcgcgttagtccccgacgaaggggtgatgtttgtaagcttcggaggcgagggacccagccacatcgatcgcttctccatggacggtacggatcgaactcactctatagacaccaaactaacggggccagtgtcactggcgtacgatcccgatttacacagggtgttcttcgccgacgccaccaacggcttaatcgaatccaccaacgtggacggcgacgatcgcatccacttcagaaccgtcgattctcaccccatcagcttgctggtgctcaaagacgatgtgttctgggtgaacgtgcactcgaagcagctctactggacctcgaagaaagtcccatcgaattacgacaagaaaattacgctggcgttccccgacgatccggacaaggtgcacttggtgtcagtaacgtcgcgccatgtagagagcaacttatgtcgcatcaacaacaacggttgcagccatctgtgcttgcagtcgcagaagtccatcgtgtgccagtgcccgatcggctgggagctgaaggaggacaaccgcacctgcgccaagagagtgggttgcatcggcggcgagtttttgtgccaccactccaacacttgcattttgaaaagcctcagatgcaacggccacaaggactgcttgtttggagaagacgagagcgattgcgcagctgcagcgaaatgcggaggaagcgagttccaatgcgccaacggcgattgcatagctgcggatctggcctgcaaccatcggtatgattgcaaggataaatctgacgagcacggttgcgatgatgttaagaacggcactcgatgcccgccagatcacttcacctgctcgaacggggattgcatcagccagcatttccactgcgatggcgtctccgattgcacagacaactcagacgagattcactgccaggtgaacgattgtaatgcaacgcaatttaggtgcgattcgggctcttgcattcccaaggaatgggagtgcgatcacgattacgattgcatggatagttctgatgagcattgcaatgcgctgtgcccggagagccacttcaaatgcgacaacggcctgtgcgtggacaagaagttaatgtgcgacggtttcgacaactgcggcgaccactccgacgagaagatgcacatgtgccaccagagggccgcgcacaactgcaccgcctacgagacggcctgctcgtccaacgcctccatttgcattcctttggaagcgaaatgcgacgggaaatccgactgtcccaagcacgaagacgagatcggctgcgccatgtgcgccgacgaggatttcgagtgccgcaacaagcatttgaaggactgcattccgaggatgtggctgtgcgacggcatgaacgattgcggggacaacagcgacgaggacttggtgatgtgcagcaaaaagaacagaaccatgttcgctccggcccaagtaccctgcaccgatggcttcaggtgcgataacggcaactgcatcaacgcatccttgctctgcaacgggaaacacgactgctatgatggctctgacgaaggaggcttgtgcaccgggtcctgcgaaggctctaagaatccttgtaatcacatctgcatcaaaacaccgaaaggtcctaaatgccagtgcaggtcgggctacaagttgatgggcgatggtaaaacgtgcgttgatgagaacgaatgcgaggtctatcctcccatatgcagccaaatttgccgcaacagagaaggcggttacacttgcgattgcttccacaacttttatttaagaaaggacatgaaatcctgcaaagcggcgggttccgacatgttgatctacttcaacgtgaacggcaatcaaatctacgaaatcgcgccgaagaacaattcgatgagcgtcgtccaggaagagtcgatgctgaagatcacgagtctggatactctggtggactctaaggagctcttcttcagcgtgcaggacaccggcgccatctacaagctggatccggctacaggaaccatgcactacatcaagaacttgggcgagccgaagctgatagccgtggattggtcgacggggaatgtttattatcacaacgcccaatcggacgcgaaatcgatcggggtgtgcaattacgaggagaagtgcgccaaattgatcgacatcgacgcgcatcgacaggtgtccgcattggctgtggattctttcaacaaagttttgttctatgtggtcagatcgtggacgatattcgcatcgcccagctacgttatatacaaaaccgatttggacggtagcaacgtggtggaactggtcaaaacaaatataggcaacgtggaacacatcacctacgatttgaacaaacgacagctgtacttccacgacgagaacacccagcaaatcaacgtgatcggctacgaagggggccgcaccaaatccctcttctacaacgtgactttaatcgaagggctcagactgttcgaagataatttgtactacttgcgccaggacgggttcctcatcagatgccagttgttcgaagaggccgcctgtcactacggtttcaacttgcacagtttggctagggacgagttcgtaatctcgcacagatcccttcagcccttcgttgggcacgtctgcgatgggcatgcttgcccctacatgtgcgtggctggacaagagggctatttgtgcgtttgccatgacggctcgaccagtggcgaatgcggcacaccgcaagacgagaacggcgagaacaaattcaaagtaacttccatcgagggaaaatccagatcttcggcgtttttgtccggtttcgcggtgtttggggtactagtagcatgcgtcatgattatacttggggcttattacatgataaagaggagaagcggtgataacagtaccgatttgagcatcgtgcgatttcaaaatccgctttacggaagacccgtggaggacgagaaacctattttggagcccgggaagcacgagtacgtgaattgtttgtaccaacacaaagcggatggtggcgaaaatagcaatactgaacccaaaacgttcaacgtctgtgatgataatttgtgttaatttattgtttttttatgttttacgttaattaggtgcattatttgattgttaattctatttataacacattattatatgtatatacaaattgtta

SEQ ID NO: 34 - DNA, 5341 bp, Phyllotreta cruciferae; identical to SEQ ID NO: 33

SEQ ID NO: 35 - DNA, 5186 bp, Nezara viridula
ctggaacgagtttaatttattgtttgtcacaacactaatcattctggtcacttctagcgaacaacatgagacagaatgcgatgataatttcttcagatgtcgctcaggcagatgtatatctatgagcttcatttgcgatggatatgaagattgcggccatggggacatgtcggatgaagagaattgtcatatgaccactaccccaggaacgaaaccatgtaataaggatgaataccagtgccaagataggctatgcattccttcgttatgggtctgcgacggtgaagcggactgtttggatggcagcgatgagactcatggatgtactgcggggacatgtgacggttttctgtgccacagcaagacttgtatccccaaagagtgggaatgcgatggcgtaagggattgtcctgataattcagacgaattgttctgtactaagaaaccagtgaactcagaagaatgcagtattcatgaaaatggtttcttgtgtcgtgatcaaatgaaatgtattgaattgaaagaagtctgcaccctgattgtgatgatagttctgatgaaggtggcgtgtgcctcgtttcaaacaaaacagatacatgtactaatctgaaatgttctactaaccaaggctgcataatattacctgaggggcctgtatgtactgaggtgtgcatgaaaggataccacttcactggtggttcttgtttcgatatagatgaatgtttatcatttggaagttgtgaccaaatatgtatgaacacaattggaggctacaattgctcctgtattgaaggctataaatttaatattgatttgaacaaatgcaaagctaaaggaagtgaaggcatattatttttcacttcaaaccaagaaataagaggatattatttagactctgaagtctactttaaagtagtagaaaatctaccacatgcaacaggagtaacatatgatggtgttaatgtttattggacaacagtagcagatgaggaagaaacaattgtcaaagcagctgaaaatggtgaaaatcaaaaaataattgtaacttctggtattggcagacctgaagatctggcagttgattggattacaaaaaatgtatacttcacagattctaaattaaagtatgtaggtgtttgttccaatgatggatactattgccttatgctccacgaagatcaagtggaaaaaccacgtgctattgtcctgcattcatcagaaggattgatgtattggtcagattggggaacagaacctgccattatgcgttcaatataataaaatttataaaagatgacattcattggccaaatggtctagccatcgaccatggaacaaattatttatattgggtagatgctaaagaagcaagaattgaatgtgtaaaactagatggaaccgacagaagaaaagtaccatccactgctgtaaaacatcccttttccattgatatttttgaagatagaatcttctggagtgactgggacagtgaccaaatcgtatcctgcaataaattttctggcaaagattgccatacaataataaaagaaagagaccataagatttatggtatccatgtctaccatcctagtaaaggaagttattaatccttgccttgatgttcaatgctctgatatatgcctaatttctccgaaaaatatggatgatgatttgcaatatacttgtgcttgtccttatcataaaaaacttagcagagatcatcatacatgtattgaggataagccacttcaaaccataattgtgggttctggacagcagatcattaaaatacaacataaaaaatttggaggatttagttcagatcatttcaaactaacagtattaaggaaaataggtgctctagcttatgatccaaattcagatagaatcattgtaagtgacttagttagacgtaaaatattttcattcaacgttaaaagtttcgaatcagagatattaattgaacacaatattggaaaagttgttggtatggatgttgactattatgaaaataatctatattggatagatgatgagaaaaaaactattgaagttatgaatttgcaaaacaaacatcgattaacactcatacgagatctaaatgaaggtctcaatgatatagcattggtgtttatgtttgttgcactttcaacatttgagggtgcacacattgacaggatatcaatggatgggcgacaaacttccagaattcatgtaattgaagagaaactatttggccctttgtctcttagctatgatcctaaacttgagcgactgttctggtctgatcaaatgggaggtgaaatagcttccacagctgttgaaggacttgatcgacatatttttaaagacggacattccggtccagtagatgttgcagttactgagtcagaagtattttggcttggttatggagctacgaaggttttttggtcaaataagtttgatggatctcttacaaaaagatttattttagacaagcttgaagaaactgataacatgaaaatcattggattaaataaaggtttaaggaaggaagcaagtgcttgcaatgcccttggaaactgcagtcatgtctgtttgatttctacacatatggggatttgtgcatgccctgacggaatggagcttggatttgatagaaaaacctgccaaaaattacttgcctgtaaagaaggacaatacaaatgtaccactggtgaatgtatttcaaagtctctacgatgtaatggtagatcagattgtaggcttggtgatgatgaagaatattgttctataatttgttcaccagaccagcttgcttgcttagatggttctagttgtattgaaaaatctaaaaaatgtgattctaaagttgactgcaatgacggttctgatgaaaaatattgtgaatctactcggaattgtactggaaatgaattccaatgcacatcaggagaatgtgtttccaaagtagcacaatgtgatggcatgaatgactgcaacgatggcagtgatgaaagcagttgtaatgctttcacttgtaaaactaatgagttccgctgcaatacaggaaactgtataccaaattcatgggtatgtgacagtcagattgactgtaatgatggttctgatgaaggtccaaaatgttctgaaattgaaggatgcgatgaagatcagtttacttgtgacaatggtcactgtatttctcatgttttggtctgtaaccatgaagatgattgtgaagattcatctgatgaaaaatattgttactttccaaaaagcaaaaaaaaatatgataatgaggaaaataagactcaggattcatcaaaagactgccaatttttatgcccttcagatttaaaaatatgtttgccttcatcagggagatgtaatggaacttcagagtgtccagacggagaagatgagcttcgttgcaacaagtgctctgaggaagaattcacttgttcttcgagtaagcgatgtttgccaatgacatgggtttgtgataatgtcagtgattgtgaagaccagtctgatgaaatgcattgccttaatggaaccttggctgtacacgatatgtttatttcagacaatcttctatgtgatggtttattctgcaaagatagtaagaaatgtattcccttaagtaaactgtgtgattctcttatggattgtactgatgggtcagatgaaaaaggcctttgcggtaagggatgtgaacacgctgcatgtcatcacaaatgtaaagagacacctatgggacctaggtgtgaatgcttaagtggttatactctaggaggtgatggtaggacttgcagtgacatcaacgaatgtgagaaaatgtcttcttgctctcaatattgccataatactgttggcagttatagttgttcatgcatggatgataattttcaactaagatctgataaaataagatgcaaagcaaaaggaactgaaatgaagtattactttgccacgaaaaaagaaattaaatataaatcccaatccttacagcaaacagttgtagtgtatcaatcacagcgtgatatggatatgaaaggaatggattttgatatgaataatgatataatattttggacttcagagattagtggttatttgtacaaagttgatattaaatctaaaaacatcactcaaattacaaacctcataagaccaacaaaaatatcatatgactgggttactggtaatgtttatgtccttgaaaacttcaaaattataagagtttgcaattttgaagctaaactttgttcagcattgtacacagctaagaatggtatcaacattgaaaccattgctcttgatccaaaatcgagaatcatgttctggtctgaaagtaaatggttaataaatcaaacacccaatagtacacttcagctggcatcaatgagtgcagataatccttgggcagtgctaagttttgattttagtccagttactgatattgtagttgatcattttcacaaagttgtttattggtcaaacttagcagaaaataaaattgaaagatgtagttatgatggaaaagacagatctgtattattgcgtagtgagtatcctccaagagacttggtactgtttgaagattatttatactgggtaaatgatcaaaaacaatctcacattattcgtccagaagcagaaggaactattactaaatatgggctgtatggatctgtgtatatgaagcatgaatcagtaaggcttttaccttcttcatcctacaatgaaattaaagctttccgggtttcacagtctgcactccagcctgaaggagtgaatcattgtagcaaaatcacttgtaattacttgtgcataagcaatgaaaacgaaccaatatgttactgtgaagatggctcaaaagtgaaacccggagatatatgcaacaatcatactggaatacatttcaaaacctatgaaacagaaaatgtatcagggagtagttcagtattagcttggtttttctggattggtgggttagttatagcagctggacttggttatgcaagttatcattttgtagctaactatgttcaaaaaaataaaatacacccaaggttcagtgtattttttcctgttggccgttctgaggctcagagagaacaaggatcacaggttcatcagtttgaaaaccctacatatagtgaggtcattgtggtataatgaaatatgaagttaattta

SEQ ID NO: 36 - DNA, 3378 bp, Diabrotica virgifera
agaatgacggattgaattgaaaaagaaacagctgaacaagaattaactgtctacgaatgatgaaagtaaattgatgaagtataaaacttagaaattagataacagaagtagtcaactgcatccaaattcagctgatttagggcatttacgggaaccttttaccttttgggaagtgaaagtggccgtgatatcgaattagtataaccgaactgaaaatgacccatgtagtacaaacacaaaaacaagtcattcgttaattggtaaaagtgcctaaggtcctattttcatcttgtaactatgaaggattgtttaaagtgttgataagttagtaatgtaccctaaaattaattgtgtgtaatgaatacctgctagtaattaccgaatttggagcgagaaaagagaaagaaaatgtcatcgataaaaagtggaggtctaaccaaaaaggaaggcaagatgaggatcagagccttcccaatgactatggatgaaaaatatgtagaaagtatatgggctttattaaagaatgctatacaagaaattcaaaagaaaaataactcaggtttaagttttgaagaattatatcgaaatgcatacaccatggtattacacaaacatggtgaacgcctttatacaggattaaaggaagtggtcacccaacatttagaagtgaaggttagagaagatgtgttacgatctttacataataatttccttatgactttgaatcaagcttggaatgatcatcagacctccatggttatgattagagatatactcatgtatatggacagggtctatgtccaacaaaacgatgttgataatgtatataatttgggacttatcatttttagagatcaggtggtacgttatggctgtattagagatcatcttcgagagactttattagatatggtaatgcgagaacgtagaggagaaaaagttgatagaatttcaattaaaaatgcgtgtcaaatgttaatggtacttggaatcaactcccgagttgtctatgaagaagactttgaacggccttttttgcaacagtctgcagaattttataaggtggaaagtcaacggtttctggctgaaaatagcgcatcagtgtatataaacaaagtagaagcgcgaatcaatgaggaatccgatcgtgcgaaacactatttagataaatcaacagaatctcgaattgttgaagtagtagaagaagaactgatcaaaaaacacatgaagactatcgtagagatggaaaactctggtgtggtacacatgctgaagcaccaaaagaccgaagatctatgctgtatgtacaaactgttcggtcgcgtaacagatggtttgaaaacaatggcagattgcgtcagtttgtatcttagagaacaaggtaaagccctcgtccaggaagaagaacaccagccggccaccaatgctatctccttcgtgcagtcattgctcgatctcaaagacggcttcgaccatttcctccagaattcctttaacaatgataaaatatttaaacagatgatagcgtctgattttgaacatttcctcaatttgaatcccaaatcgccggagtatttgtcgctgtttattgatgataagctcaagaaaggtgtaaaaggcatgaaatcttctaaccttgaaagattcctcaatttgagccccacatcgtcagaatatttgacgctgtttagtgacgattacctcaagaaaggtgtagaaatcatgaccgaacaagagatagaacaagtattggataagtcaatggttttatttaggttcctccaagagaaagacgttttcgaaaggtattacaagcagcatcttgccaaacggttgttgttgaataaatctgtcagtgatgattatgaaaagaatatgatctctaagttaaagacggagtgtggatgccaatttacttctaagttagaaggaatgtttaaagatatgactgtttccaatacgattatggatgaatttaaagaacatgttacgaagtctgagacaaatttaggtggaatagatttattaatgcgagtgctgacaactggcttttggcccacacaaaacgcaaccccaaaatgtcatataccagctgtaccactagctgccttcgaatgttttaggagattttatttagccaaacacagcggccggcaacttacgttgcaacctcaacttggaagtgccgacttgaacgctatcttctacggcccgaagaaagacgatagcgacaaggatggcgcttgttcttcctcgacaacaatagtctcgatgaggtcagggcctaggaagcacatcatacaagtgtccacttatcaaatggtagttttgatgttgtttaataatcacgataagttgacatatgaagagatccttaatgagtctgatataccagaaagggatctaattagggcgttacagtcgctggcaatgggtaaagcaacgcaaagagttctcataaaaaatcccaggaataaagaaatagaatctaatcatgaattctatgttaacgaatcgtttagttctaaacttcatcgagtgaagattcaaaccgtagctgcaaagggagagaacgagcccgaaagacgagaaactaggaacaaggtcgacgaagatagaaaacacgaaattgaggcagctatcgttcggataatgaaatcgcgtaaacgcatggcgcacaacatcctcgtcacagaagtgacagaacaactcaagagccgtttccttccttctcccgtcataataaagaaaaggatagaaggtctcatagagagggagtatctggcccgtacgcccgaagacagaaaagtgtacacatacgtggcatgaactttaacaaggatcattatgagactttggatagtggtccagtgatcttcaatagatgaatatttacataaatgtaattattaattattaaattattccaacaggttctttttgtctaatttcttcaagttgttgaagaaaaataatgtatttgtggaaagataacttccggaccatattaacaattttcaatttatttataataattttgtgatagattgattgacaagataattttagattttcagtttgcaataaataatgtagagtgtgtttgatgatatattaaatctcgatttggacttttcggaaaattaacacgttgatggacagaacgtataggcgtctaatttccattgatgtaatgtgacacaacgtctattataatttttaaaataacgagttgtaacaaaaaatccatgtcagaaaatatcacatttcatctacagaggcacattgtttccataaattaaaagcgttaaaagaaattcagcaattttcctattctactttgcaaaatacaaggtgattcagtgaaacggtacgatt

SEQ ID NO: 37 - DNA, 1786 bp, Diabrotica virgifera
caccggcttacgtaataattaatttattcctttcatttgcaccatactatatattatttattgagtggacaaatgttaaaaagtaagtctggcagcgaacgtgttaatgaaacctagtaaaaggctccaacatttgacacttcttcatgcaacatgttctgttctgtgtcaatctaacctaacctaacattttcaaatacgaatatggaaacatttcaccacatcaacacgtgaattaatattcgaaaatggagtacgaaaatacacaacaaaatataaacttcgtaccgtgtgtaagatgggttaaacgaggagtggccaattcaagcccagtaaaattgcaactgtcgaaaaacgagctggctcaaattattaatgacaccaagattaaattacaagaatccaatgaaaatgaagatgagcctatggaagaaggtgaaacgtctcaaacagatgagtttgccttagaggattacgataaagaagacgaaaatgaggacactgcaaatgctttaggaattggatcattggcagaactcgataatgatgctgcagacaatttttctgagtcagacgattctgaaaaagaagatgataaaatcaaaccatctgacaatctcatactagtaggacatgtagaaggggatgcaagtctattggaagtctacatatacaatgaacaagaagagtcattgtatgttcatcatgatattatgttatcatcctttcctctgtgtttagaaccgctaaactatgaaccgaagatgcccaaaggaaattattgtgcagtgggatcaatgtcacctgttatagaggtctgggatgtagatattatgaatgttattgaaccttcatttactttagggagacctgctagtaaaaagaagaacaaggaacatataggccatacggatgcagtgctttcattagcttggaacaaaacctttgaacatgtgttggctagtggatctgtagatcaaacaatacacttgtgggatatggaaatcaaaaaaccaagtacaaccattaaatccttccaagaaaaagttcaatgtctcgaatggcatcctttagaggcacaaacacttttaggtggaggttgtgacaaatctgcaagagtatttgatggcaggacccctgaaacccaccaaacttggctacttgatggagaagctgaaaggctatgctggaacccattagaacctttcacatttttagcaggtaccagcagtgggtctgtacagtgtttcgactgtagaaaaggacagctatggtcagttaaagcacacagcaaggaagtaacagggttagtccttagcaaacaatgccaaggattgttgattacttcttctacagatgaaacagttaaaatttgggacttggctacactggaagctgaacctaagcttgttaatgaaaaggagtttaatatggggaatattcactgtttggatttatgtccagacttgccgtttgttatatctgtaggtggagataagaagtcaaataattttactgtttttgatgtacagaatattgatgttgttaaacacacatttgggccaagaggattggtacagctagttccagatacagaagaaaatactaatacgttttattgtttaataaagtttttattttatttatttgtaataatttcatgcttcttctttaagtaccgtgcccaaatattagtcattggtagattccttgacaatttgccgatactgttttcgattactgaacaattcatcttctgatgagccagtccattgacaaaggtttc

SEQ ID NO: 38 - DNA, 3948 bp, Diabrotica virgifera
  misc_feature (3773)..(3795): n is a, c, g, or t
tggttcttaccaacttccagacatttttttttggtggttaaggcccatctaaaatgcccaaatcaaataaatctagaaatgcgttttactactttatggaggattttaaacaaagacaaggatttgcttgtaaatcgatgaaggatgtagcagatgctgcaggtccccattgggctaggatgtctaaagcagaaagaagaccttatgaagagagggcaaacaaagagaagggaggtttgagatatacttgggatggtcaatgcgttgaagatatagaaaggaggaacaaagctgaggacaataaaattgctaagatgaaagatgatatcgactgcaccttgaaatttgccaaagaaaattgtcgactccgagatgaaatgttcttcataatccatatcaatactttctgttaccatgccagtggtgatcggtattatcccgctgaaattgccatttcatgcttcagcttggaggatggcgttttgcctcaaaatgtgtttcataaaattattaagccaggtagactaccactggggtatgctagtgacgcaaaaaagcaatctgaagattcacatcaactgcctatccccttaactggtgacgacgacgacaatgtggaagaagtttatacagagatgaaagaatttatattatctaaaaccggagatactaagaaattccctcccttgtatgctaagaaagatattgttaaaatgttgcaacatgtgttagacacttggtgcgctgattttgatgagccgccattatttaaagtttattatttacaatatatgtttcaagtattaaaaaactcggtagctaacgataacgtatggcccttatattcaatggcagaaacggaactggataaggatctttattcccatactgttggaatatgttgtgaattccattctgttagtgaagcttgtcaattttgcagcaagtcagtggcagtacgacttgcatacacaatttgtgataattgctgttcgttcctagatattcctatagagcctggaagacacgtacctgatcaagcttttacagcatccagtttgagctcaagagcttcatcaaaagctagtttgtatacaggttccagtaaatcttctaagaagcagtcagttcgtgaagatgacaaagacactgttttatcgttttctagtgcctctcagtgggagagcgaatctgtagtgtcagactcctctacagctactttcaataatagctttccaggtctgaaatcgaaatggacattaagcaattctcaacctgtagaaactgactcaatgagccaaatgtcaggtcagagctatgcaagtgctatgggaactagaagacagttttctagtgcaatgggaaatagaggatctcaaagagagtcctctaacaattccaacaatggtgacactagtgattcgaataccgattattttaacagtcaatcatttccggctcttggaaggggaagaggtatggccagaaatcgaagaaattgatcatttttgactgcaatgggtcttgttccacttcatgagattgttaaatgagtatgtaactgattacattaggcgacaatattttttttagtgtcagattatttgatgtaattgtccttttgacaattctttaatcattgatgttttcttctattgtggtgtttttagatgtcatatttttatgtatgtaaattggttttttatctaagtatagaatattacattttagtttaataagataccagtaaagtatattggtttaccagtcgcctaatgtaaactagtatatacatacctatattatttttctttaatagttttaagtcaattttgatacagatcacgagacagatattttttccgtctagtccgaattgcgttccgtttcttgggccttgtcgaattgcgtcccaaatattttgcttacctggccaccgataacgtctagtccgaattgcgtttcatttcttaattagccaacccaattgcggtcagaagatagcttaataaatattagttaagcagggaaatacaatcaacgtaatatcaactaacagtttatttttattttagcaccgaatttataactaacacatttaacgaaattgtatcttgaaatttcacccctgttatactggttaattttctgttcgagaaaaatatatttgctggaggtagctttatctacatttctagaaatattttgtttaacagaatttatttttatataagaatcggtttgaatgcgctttaatgtttcaacaaacaaaaaaatattaggatgtggagacaaacaataatttttaaattttgaatgaaatcactcacaagaattagttgttctatatatagatgcgctattctttgcccaaatttgtggaggaaatgtgtagtcctcttcgatatacctttcaactagatagtttgcaaatgcgtcaactcgatgatcatctggtttttcaggcataaaatcttccacaaaacaatctccaacttggctcggaggaagatacattaggccaaaaatatgcttcagccatttacctatttctgagttctcgttcttatactcagaactcaaccccatattttgtactttacgccacctgtaacaagattatagaataaattctttatttcagaaagtacttgcattcaagaaaaagtttgaaacaggtcagattttataaaaaaaatacatctttaaaaaataatgagaatatttaggagccaattttttgacagaggttatgacgacatcttttttttatgtcaaaaatttgaagatattttacctacaattcttgttttaacttatatcaaatgctgttttttgtaaaaaaaaattgaaaaaagaaattacagtgaagtttgaaataaacatattgaaatgtttagttttacagcaaaaaaaataggatgacgtcataactcaagtttttcttaacaatctactatttgccagttacattgccatacgtattacttaccaagcttgagcaagatgaagtcgataaccaacaacatttgcttccggaaaaacttctcgtacgctggagtggatacctaattcgtaatcaatcactattttcgttggatttaaattgcatcccaaatcttgacattttttctttaataattcgaataatgatttgtaagtgaatttttgcttattaggtaacaaacaaaatgcaaccggaacataagtgtcattaatcaatgtatgtaatgtaaacatttaaaaaaaaattgtgcaataatcgaatgttccatccataaataaagtggaattgttacacataaatgaaagattagacattcatgaaaaaacaaaaatattaaactgttcatcattaatcaacaaaaactgttcatttttgatagtaaatatttcaatttgttccaaaaattcttgaacatccttggctgattttggcaattttggaaccgttttcaatcgcgtgcgattaatgttctttttttatgtattggacatcttttgttgacagagaggtaagtacttcgctttgcttttcgatttccttgtgtaacaacttcgcaggtcgttccgcaatatcttctgttgcttttcttttaagagaattgttaactttctggcgaattaatacttcttcagcaagctcatgattgtgttcaccactaacttttgaaaacacattatttaatgtatatagttttgctttacactttttgaagttatacttctttaggcgcgattgagtaattatttattattaatctgcgcgcatnnnnnnnnnnnnnnnnnnnnnnnggttgctaatctttcaaattatgtatcagcgcaaataagccattaaaataatatattagtgttttttagtaaatgtattatttattatcatttttgtgtctttggatttgttttcctttggcgtaaaataataaaatatctatttttatattt

SEQ ID NO: 39 - DNA, 2088 bp, Diabrotica virgifera
caatcaagtgtcaaattgtttttaaaaaataatgacagaggaatcagttacagcaatttccgaacgagaagaactagaaccagaacttcccccaccaccaccgataactctgaaggaagtctttgtacaagaacatgaagatagtcctgattcgtctatttccgggtccgatgaagaaagaaaaacagacaaacccagagctgatatacctcccgaatactggcacatacaaaaattgattaaatatttaaaaactggcaatcaaacggctacagtggttgcattatgttgtttaagagaccatgacttaactacagaaaccagtcagcttgcaatccaagaaataggcggcctggaaatattaataaacctgctagagacaaaagacctcaaatgcaaactaggtgccttgggcgttttatcagagctgtctacaaatatagatatacgcaaatccatagccgatttgggtggagtggagttattggtacagaatttagctgagccagctagagatcttcaagtacttgtagccgaaactatatacaatgttgctcaaatccgaaaagctaggaaacacattcgaaagtgtaatggaatacctaggttggtcgactttttagatgtgaaggagtctctattgaagacgccgaaagatcagttgaatgagtatgatgctgaacaggtaaacatagcaaaagctgccaccagagccttatggtccgtttctaaaagtaagaagaatattcgcgtaatgatgaaaagtggttccgtgcccctactagccagactgcttaaatcagaccatatggatgtggtggtaccaactatcggaacgatctcccaatgtgccatcgatcccacttatcaattggccatccagactgaaggaatgattaaggatatagttttgcatctattttctgaggaatatccagctctcagaagatactgctcagaaactatatttagatgtggagaaaatgctctgattagagatatggtaagagaagctggtggtctggatcctttgatcaagatggtaagggatccgaaaacaaaggaagacaaaccgctattggcggcagtgactggagctatctggaaactggctataagtccgcagaatgtagaacgcttcgatcagttaaaaacggttgagagcctagtaacattattggaaaacgtcgaggaagacgagggcgttcttagcaacgttgttggtgctcttggagaatgcctaaagtttgaacacaatcgacacaacctgcttagagctaatggtatacctcatttagtaaatctgctaaattatacctatccccctcttctcgaaaacgttccaatggttttaagggaatgcgctgaagattatgactcgatgcgtgttatagaagaactggacggagtaaggctgatttggtcattgttaagaaatgactcgcagaaggttcaagctaacgcggcttggtcccttgttccttgtgtcagatacgccacagactcaggagaaatggttcgctgcttcgttggaggattagaactcatcgtgaatctattgaaatccaacgataaccacgttctagcatgcgtgtgtgcggctgtttctgaggtagctaaagacatcgaaaatctggcagttatgaccgaccatggggtagttccgctattggttaatctggtgaatacagatgatgtggagttgagacagcatttggcttcagctattgcttattgctgtgcgtggggaaccaactgcaaaatgtttggaagattgggtgccattactcctctagttcaatacatggccgacgatgacgccaatgtccacagaaccacagctctagccttgttccacctttctaagaatccgttcaattgcattacgatgcacgaaagcggagtagtgacttttcttctaagagcagtgtcttccaaagactgggagctacaagaagctgctgcggggtgccttgctaatatcaggaaattggcattggaagctgaaactgtgcatcttattagaaatagggacgacacttctgatgaggacaattagggatacgctttttgtggatttttatatac

SEQ ID NO: 40 - DNA, 2198 bp, Diabrotica virgifera
cgaactaagctaaaattaatcgtgaagtgaaatccattttaagaaaaaaatggtttaataagaataatttatacaaaagtgatatttatatattttcgttgacgcgttgaggatattgtgaaatatatcaaatagtgtcaacatttgaacaaatgactatatatgtgtaaaagactgtagtgatcaccagatccaaaaaagggtgtcttcaagaaatgtgttaaacccatgaatctttagaaaagagttaaattgaagatatgagtggccgaccaagaactacttcttttgcagagggcaacaagcaagctaagaatccacctttggggggtatgaaaatcagcaataaaatttaaaatggcgtcgaaaagtaaaagaggaaaaagtaaagaaatggaagatgatattagtaaacttgtatctacactcaaagttaggccaggtaaggatggaagcaaagtgactacagtagttgcgacgcccggccaaggaccagacagacctcaggaggtatcatacactgacaccaaagttatcggcaatggcagcttcggtgtggtctatcaggcgaaattgtgcgaaacttcagaattggtagcgattaagaaagtactgcaggacaaacggtttaagaatcgggagttacaaatcatgcgaaaattagaacattgtaatatagtgaaacttaaatatttcttttactctagtggagataagaaagacgaggtgtacctgaatttggttttggaatacatccctgagacggtatataaagttgcacgacactacagcaaatcgaagcaaactataccaattagcttcatcaagttatacatgtaccagttgtttcggtcactagcatacattcactctttagggatatgccatagggacataaaaccgcaaaacttgttgttagatccagagactggagtgttaaaattgtgtgatttcggaagtgcaaaacacctcgtcaaaggtgaacctaacgtagcttatatttgcagtagatattatagggcaccggagttaatttttggtgctatcgattacaccacgaaaattgacgtgtggagtgctggctgtgttttagcagagcttttattaggtctgcccatatttcctggtgattcaggcgtagaccaattagtcgagattatcaaggtgttgggaacacctaccaaagaacagatcaaggaaatgaatcccaactacaccgagttcaagtttcctcaaatcaaatcacacccttggcaacaggtattcagagctagaacacctcctgaagcaattgaactagtagcaagattattagagtataccccttcttctagaattagtccgttacaggcttgtgcacattcttttttcaatgaacttagagaaccaaatactcgacttccgaatggaaacaagctaccacctttatttaattttaccgaacaagagttaagcattcaaccagcattgaacagtatattgttgccgagaggaacgcaggaggcagctaatcctcaggagagtacgtcagctgctagtcaggaagcctccgaggcgacagcaactatccaagcagcggctgcttctggtatagcttagttaatagttagtttattcgtgctagaatgtttaaatttacacttgtcaaatataatacctaaaatacttcactctactgtaggggtcgacccatttatgtttatttgtttgtcgatttagataatttcaaggctgatgtatcactttataggtctattggccaccatttgatatgttttagtttaaataatcgatatacacatatggcttggtttgaaaacacctatataatctttatatacagaagcatatatagtatatatagtttaagtcaaatttatcactgtaaaattcttgtaattggggcaatctagttaaataaatttatcaagttagttaatgtatttgtaattctttagattcagtatataggccagcagtttacctcgcaaaagatgcctagcaataaaatacagtgatactactaataactgacaaaataaagcaaaagatggaaaacataaaagttgtgagataaaaagaaaagaaactagcagagatggtaaatttagttataaaaacctataaacttgaattctacttaatgtttcccaccttagacatatcagagctatatgtcaactaaaactgtcactgtt

SEQ ID NO: 41 - DNA, 3910 bp, Diabrotica virgifera
tttagcaacatttacacggcggcggtagttaggaagcaagcgctcgaagcgtcgcaatatagaacgtcaataacgacgacgacggatagctagtgcaacaggtgattccgcgtatttctgttagttagcagcgagcgagaaattacacaacgcggtgaaaagggaaaaggggaggtcgcaacacaacgtgttaatacttttccttagaagattcgaacgattcgtttttagtgccgtttcacttcaaaaatgttttaggaaaaaaagtgcgtttaagtgtcatgtgtgcagtttattgttgaatgtccccttacagtagataccggcctttaccaggccctgatggattggttctgcaaacatcacccgggtgtagaccttcaccgaccagtgcttgcagatttttgcggtggatatccaaattgagtccccagcccgttaataaacaaggattaggggtcctggacatgaccgccacggagaacaccatccgttttagtgtccataccctggacaaagcaaccaaagcaaaagttactttagaaaattattacagtaatcttatagcccaacatgtagaacgaaagcagaggttagcaaaattagaagaatccttaaaagacgacagtctctctgaggagcagaaacatgaaaagaggctacaacatgcccaaaaagaaaccgaatttcttaggttaaaacgatctcgactaggcgttgaagacttcgaacccctcaaagtgataggtagaggggccttcggagaagttagattagtgcagaagaaagatactggccacgtttatgcgatgaaaattctcaggaaagcagacatgttagaaaaagaacaggtggcgcatgtgagagcagaacgggatattttagtagaagccgatcatcagtgggtagtaaaaatgtattatagtttccaagatcccattaatctatatttaataatggaatttctaccgggaggtgatatgatgaccctactcatgaaaaaagacaccctttctgaagatagtacgcagttttatataacagaaacagcactagccattgattcgattcataaactcggtttcattcatagagatatcaaaccggataatttattgttagacgccaaaggacatttgaagttgtctgatttcggattatgcactggtttaaagaaatcccatcggacggatttttatagggacttaagtcaagcaaagccttcggattttattattacctcaagtccgatggatagtaaacgcagagcggaaagctggaagaaaaataggagagccctggcctatagtacagtaggcacacctgattacatagcaccagaagtattcatgcaaacgggatacggacctgcttgcgattggtggtcactaggtgttattatgtatgaaatgttgataggttatcctccgttctgttcggaaaaccctcaagatacatacacaaaagtgatgaattggagggatacgttggttttccccgctgaagtaccgatctctgaagaggccaaagatacaatcattaaattctgttgtgaagcagacagaagactgggatctcaaaaaggtctagaagacctaaaattaaatcagtttttccgaggcgtcgattgggagcatataagggaaaggccagcagccataccagtagaagttaagtcaattgatgacacatcaaactttgatgattttcctgatgttaaacttgaaattccttctgcgccccttcctcaagacggcgagatcaattataaagattgggtcttcatcaactacacattcaaaagattcgagggactcacccagagaggtactccaacgaagaaatagttgtttgttaatagtttttaccacgataaagatatactaggcagttgaatgcccagcacttatttttagaaaataaagtcatttaagagatgtttatattaattatattaaataaaaagtagtaagtttcggtaaagacaaattccacaatatctttacatgccatcgatcattccgtttattattaatttttatttctttattatttgatttttaaaactatgctatttgtttcatcgtgttcttttaatttttaactattgcaccatcaactcaaacggtttatacaaggttggaaatccaagacatgaatgaatatacagtggataaattttgccacactgcaagtgtagtctacttctactcatttctttctgataaagtcactacagcggttttaaagagtttggtgtcatttgctctataaataaccaaatatgttttgtaagttgtgttcgtatagtgaaatttaacattatttttcctatatcaataaactatattctttctaatctgctctacatttgagacaaataattttttggtcattttattgcaaattggattcttattaaatatcttacttatgtttttataaaacacgacataccgtttttgattacacgtaaatcctgaagtaatactattaactgaaaaaaaaactcgaaatcgataaaatgccttgtattgtatctgctttttttatctccgtaacattcttaacgatgttccatttgaatccttgattccagttcttcacgttccaatactgtttcaattttttatttactgattttaatttatcaattaaattatctttaaattaactgcttaatcaataatgtatattaggtctctctaatttaagattaaataaaatatattagataaatagagtatattactaaaattgaaaatacaaaaggaatttcttagcttcatagatatattattaataattttaaaaaatacattaaacagttgaagttactgactcgttagcaaactaaataaaaataaaacatgtggaatttgtttgtgccgaaatcgttaaatgttctatcgattgcgctgtattgttttctaaaaataagctattttgtgtattataggtctgaagcagttttgcactgttttgcttttttaagagctgtgaaaactgtatcttgcattgttctcgacgctatacttctagaagtatcgtacacttcaaaattatttaattcattataagcacttttcctgtacaagacttacatcgtttcgtcaaatattaaatatacattacgcttacacgattaacaattttacattttaacttatgtgatcagttatgttacaatttttattttttacaataatagatttttatttcctattttttaatgtaaagatctgctttttatatttaaacattattaaagatttttggttttatactttcattctatttaaatgagaaatttgatgtgattatcaaaatgatcgaaatggtaatttgaaaaaaactaatatttttgattcggattattacaagagaactgacaactttatcattaaaaagagtacctaaataattgtactttctcgctttttctcactcgttagaagcatagatttggttttgtttatgtttagtgtagtccatattcctcactatcttccatgactgtattgatacgcgcctgtaggtatttgaagtgttccgactatcatcactgtatcatctgcatatctcagattgttaactcggcttccgttaattttaacgctatatatattcttgaccactcaatgttttattcattcctccgagttcatattgaacaggattgcgaaagcacacaactctgacgaaatcccttctgtgtttctatattttcagttgaattttcttctttttgtactaattttagagttctcgaagtctagagttttcctgtatcatttatctgattactttcacattgattatcgtaaatgagccataataaataaatatccacaaggaaaaagttttccttgtatggggctgtgggttttcctgtagttggctgtaatcc

SEQ ID NO: 42 - DNA, 2386 bp, Diabrotica virgifera
aaattttgacattgcatgatagcatgtgaaactatcattagctcataatgtttgtcagtttttgactttgacaagagttgacaatctaaaaggtgatcaaagaaagattttaataaaaggttaaaaacacatttgttctttgtaagctttgttcttaaattttgttaaaaaatgtcagaaaatagagaagaaattttagctgattttcaagcttgcactggaattgaagatgttgctgaagctatttatcacctggatgaggccaactgggacttattgcgtgctgtgagtagagtaatgccaccagatactcaaagttttcgtccaccagctgtagagcctgtagatccagatgtcatgatagtagaagatgatgctgatataccaagtgcagtaactgcagacgcagcatcagatatggtagtagtaggcaacagtttgggccattcgtctacagtaacgaaaaaagcaaatacacctgatgacagctttccatccacttctgctggaaaaagtggatcacgaatgttaaaatttaatgtgcagtactgtgatagagttgtcaaagttgaattaccagagtctgcaaccgttagtgatataaacattaatcttttagactgtaatgaagaattcgtggaagagtataaaagtatcatgaatgatctgaaactaaagttgcaccgagaagtgaaagtaaatccttgcagacagcttctttccagttgggctcgattagcacagtatgaagatactccgttttcgaagctcatgttaccaaatgacaattcgcttcatttaacagtaaaaccaagcgatggagctttcacctcagacgaagaaaatgccgtatctgaaaaattaagaggtacttacactctaaacgtaaaatatgagaataagacatttaatttaaaatatcaaggaacaaaaactattttggaagtaaaaggtgacgtttacacgttaacgaatatacatgtgcgtaatcaagtatggagtgggtggcctcctaatatagacgacaatacagtactcgcactcagtggaataaactatcctgaacatgatctatcagtgcgacgaagcacacagagtgttagagagaaaaaaagtatgcccgtggttcaaattgacagtgacgatgacgaatttgaagatgcctccgaaagttttacagttgatgatgagtattttgttgacaatgaaggagcaaatgcaaaaagaacagacccattaattccagaggatgtagaagatgaaattgtaggctgtataacatttgcagaacagtttacgacaagatacggtcctgtccatcctgccttctatcagggaacattagacgatgctatcaaagaagcatgctcaaaacctgccaaagaccgaaaaattttggctatatacttacaccacgacgctagtgttcttacaaatgttttttgcacacaactgttaggttttgaaagtgtaatgcaaatgttcgaaaacaactttgtcctttggggttgggatattacttttgaaagtaatagacgcaggttgcagcaatcggttacgacatctttgggtgctacagcagcaatgagtttacgaaatataccagtagatagattacctgtcattatacttataacaaaaattcgatcgacaattgagatttttagtgtagtgtatggaaatgttggtgtaaatgagcttttgtcaagtctgatagaatgtgtagaagtatttttagaacatcaacgagtagaaataaaggaagaggaggaaagagccgaaagagaaatggttaaattagagcaagatttagcatatcgtgaaagtttagaagcagatagagcaaaagaagaggccaagcggttacaagagaaaaaagaaactgaaaccaggaaacgactggaaagtgaaaaggcactctcggaagcaaaaaaagaggcctttaggaaacaagtcgaagcagatttacctcccgagccatctctagaacaaggcgacagtattactaaaatacgatttaggttgccaaaaggagaacatttggaaaggcggtttcagacgactacacctttgaaagtgctgttagactttttaatagtgaaaggatatcctacggaagaattcaaagttatatctagctggcctaggagagacttgacttcattagataaaagccaaacactgaaagaactgaagctatatcctcaagaaactgtgatattagaagagcgatagttttgatcacacattccccaaccaagggttaggtttttataccagcatttaagcgttgtaaagttatttaatatatttttaatttcacgtagtgtatgattaatttaaatgtatgcagtccgatgaatatacattacataaaaaagaaaaa

SEQ ID NO: 43 - DNA, 2657 bp, Diabrotica virgifera
atcgtctgtcgtgtttgtcattttgttcccgcataaaccttaacgttcttgttgtcatggttcatgtgtgatgaccgttaaaaatttgccgggatattttgcttaagttcggccggaagtgattgattatttatatattttacaaacgattatagttctacataatggagacaattcaaaacgaaaacaaggagaatttcgtacatgaaatgcaaaagcaaagcgccatggccgttcctcaaaaacgaccattgggccagaggaataccaacgtggatccgcaaccagttcaattgaaagaaaaacaaccacttacagtacccagttcatttaatgcatttaaagaacaatttgaaaggaacaaatataaaggaacaaaaaatacaaataaagaaaattattgccaaaaaggaaataagaacatagttaatccagttataccctgcaaccagtttaaagactttaaagtattcgaagatgaacagtatccggaagaaaaacttaaaaatcttgcggctaaaaatccacccaaagtacaagtacacgaagataccaaggaagagacaaaagatgaagtgaaagcgccagaaaagatagtagaaaaggaaaatataaagcaagattcggaatcactcagtctaaagacatccgatgcacatttattcatgactatagatgataattataaaaaagaccatgaaattccgtcaacaaaacgtatgaaagatattttctttgaaatggaagaatacagatctgatatttatcactatctaagagaacatgagttacgaaatcgaccaaaacctggatatatgaagaaacaaccagacgtttcatctaatatgaggacaatattggtagattggttagtagaagtagctgaagagtacaaattacacacagaaaccctgtatcttgcagtaaattatatagaccgatttttgagctatatgtccgttgtaagggccaagttgcaattggttggaactgcagcaatgtttatcgcttcgaaatacgaggaaatatatccaccagagatcagcgaatttgtatatattactgacgacacttacacgaaaaaacaagtactacgaatggagcagttgattttgaaagttttaagtttcgatctctcaatacctactccactaacatttatcacagcaatgtgtgttagcaacaatttgagtgataaaactatgtatcttgccatgtatttgagcgagttggcgttacttaacggtgacatctacctggagttcttaccatcagttatagccgccgcagcaatagcgcttgcccgccatactttatgcgaagaagcttggcctaaagaactcgttcaatctacaggctacgaaggtcttcaaatcagatctggcatctcgtttttataccagatgtttgtttccgctatgactttacctcaacacgccatacaagacaaatacaagaccaggaaatgtatgcacgtatctactttgaaacctcgcgatgtggcgttagagttataatttaattagtaatatttgtaataggcttaagtctgccaaggggatcgaaaattttatggctagtttaatcgaaaaaggttccatgccccgacttcgaagaggcaataaatgctcgaatgtcaatggtgcgcggatgcgctgttgccaaatctacggaatgaaattaaattttgttctatcttgtattaataaataaaacacggttgcatatgacatatatgaaatgaaattacaaacaaaatagttgtagatttcggtccttggcaaatgacaagtattgataattaccgactgaatattatttaatcaacattaataatttatcgtaaatttatttagttcaataattacaagacatgattaaaagacgattagaatcataatcaaaccaaattacacttcgtcaagaatagtaatgtacttatcattgacttgacttcgtcaataatagtaaaggatttttaataaattcatatgcctaccccccttttaaacttttaaagaaaatttaagttcattccgtaaacttggcaacagcgcatctgagcgcaattagcttttgagtattcattgcttcttctagcttggggcatggaacctttttggattaaaactgcaataaaattttccacccctcttggtggacgttaacctttgtaatatatttttatatttagtttaatttttaagggacaatttttactgaaatgtgacgttccgttttacagtatttttaagagctttttcctatttgttcgactgaatttacacaacattatacattgccttttaaaagtttttctgtaacattttttagattttttcaacgaagtatgtggtccaagcatgagtaaagggtgttccaaaatttacgaaagatttaaatttaataggaaacgctgttttgtttttctttagattgtaattttttattgcatcataaagtacgtagaggtggtgtgaatttttgttgaatctcaccccaacagtcgcgaaaggggtttaattattaccttttgcctaattagacatgggtgaatattttacgactacacgcatctgtcccaaagcagagagtccttcgatattaacaaactagtgaacttttagggcgactggttctgagaatttatttggtcg

SEQ ID NO: 44 - DNA, 155 bp, Diabrotica virgifera
tgtcatcgataaaaagtggaggtctaaccaaaaaggaaggcaagatgaggatcagagccttcccaatgactatggatgaaaaatatgtagaaagtatatgggctttattaaagaatgctatacaagaaattcaaaagaaaaataactcaggttta

SEQ ID NO: 45 - DNA, 155 bp, Diabrotica virgifera
cgattctgaaaaagaagatgataaaatcaaaccatctgacaatctcatactagtaggacatgtagaaggggatgcaagtctattggaagtctacatatacaatgaacaagaagagtcattgtatgttcatcatgatattatgttatcatcctttc

SEQ ID NO: 46 - DNA, 155 bp, Diabrotica virgifera
atggaggattttaaacaaagacaaggatttgcttgtaaatcgatgaaggatgtagcagatgctgcaggtccccattgggctaggatgtctaaagcagaaagaagaccttatgaagagagggcaaacaaagagaagggaggtttgagatatacttg

SEQ ID NO: 47 - DNA, 275 bp, Diabrotica virgifera
tgatgaaaagtggttccgtgcccctactagccagactgcttaaatcagaccacatggatgtggtggtaccaactatcggaacgatctcccaatgtgccatcgatcccacttatcaattggctatccagactgaaggaatgattaaggatatagttttgcatctattttctgaggaatatccagctctcagaagatactgctcagaaactatatttagatgtggagaaaatgctctgattagagatatggtaagagaagctggtggtctggatcct

SEQ ID NO: 48 - DNA, 275 bp, Diabrotica virgifera
tgcgaaaattagaacattgtaatatagtgaaacttaaatatttcttttactctagtggagataagaaagacgaggtgtacctgaatttggttttggaatacatccctgagacggtatataaagttgcacgacactacagcaaatcgaagcaaactataccaattagcttcatcaagttatacatgtaccagttgtttcggtcactagcatacattcactctttagggatatgccatagggacataaaaccgcaaaacttgttgttagatccagag

SEQ ID NO: 49 - DNA, 275 bp, Diabrotica virgifera
tgaaaattctcaggaaagcagacatgttagaaaaagaacaggtggcgcatgtgagagcagaacgggatattttagtagaagccgatcatcagtgggtagtaaaaatgtattatagtttccaagatcccattaatctatatttaataatggaatttctaccgggaggtgatatgatgaccctactcatgaaaaaagacaccctttctgaagatagtacgcagttttatataacagaaacagcactagccattgattcgattcataaactcggtttc

SEQ ID NO: 50 - DNA, 276 bp, Diabrotica virgifera
atgacgaatttgaagatgcctccgaaagtttttacagttgatgatgagtattttgttgacaatgaaggagcaaatgcaaaaagaacagacccattaattccagaggatgtagaagatgaaattgtaggctgtataacatttgcagaacagtttacgacaagatacggtcctgtccatcctgccttctatcagggaacattagacgatgctatcaaagaagcatgctcaaaacctgccaaagaccgaaaaattttggctatatacttacaccacgac

SEQ ID NO: 51 - DNA, 275 bp, Diabrotica virgifera
tcggggcatggaacctttttcgattaaactagccataaaattttcgatccccttggcagacttaagcctattacaaatattactaattaaattataactctaacgccacatcgcgaggcttcaaagtagatacgtgcatacatttcctggtcttgtatttgtcttgtatggcgtgttgaggtaaagtcatagcggaaacaaacatctggtataaaaacgagatgccagatctgatttgaagaccttcgtagcctgtagattgaacgagttcttta

SEQ ID NO: 52 - DNA, 5385 bp, Spodoptera frugiperda
atgaagtatcaaagcttggtattgatagttagtgtggcgtggtgctcggctcagctcacggatgacatgcagatgtttgagccggagtgcatgacggaggataagttcccctgcatgggaggagggtgtatctcggtgtctcagtactgtgacgggaacctggactgtgaagatggcagtgacgagaatttttgcatcgaacacaagccgttccaagagttctgtaacgagactcatcagtacatgtgtcaggactccacgaagtgtgttcctctgtcctggctgtgcaacaacgagccggactgtgatgacggcagcgatgagttcaactgcaccgcgctgccggctgtcaatgttaattcaacatgcaaaggcttccaatgtggagacggcaagtgtatctctttcctgtgggtctgcgacggcgtgtacgactgcgaagataaaagcgatgagtatgctgaggagctctgcaggcacgtgtcccgtccccacgccattgtcgacggctcgtactgccaggagctgcacacgatggatgaccggaactacaaatgtctggacgcctccttctgcctgccaagcagcatgatgtgcgatggactgcaggactgccgcgatggcagcgatgagggacctttttgcaaggactggaacacaatgtgcgacaacttcaaatgcatgggtaacgacacgcgatgctccccggagaggtacgggcccacctgcctgtgcctgccgtcccacttcatgcgccagtacgactacatcaccaagcaatgccaggacgtcaacgagtgcctgatggaacgtcccccgtgctcccacaaatgtatcaacgctgacggtcactatatttgcgaatgtgatcctgggtacaagagggatgtgtatggatacctttgttatgctactggtcccgaagcgatgctgttctttaatactcggaacgatatcagatacctgaaaatcaagagtaaagaaatggtcacagtggctaccgatatcatagagggtcacggcgtatcattcgatggcacttacatttactgggtggagacggcacagggacatcagtctatcttcaaagcgcagctcggagacgtcaaggatacaaaggaggtgctggtaggtctcggtctggaggaccctggcgacatagcagtggactacttaggcgggaacatatacttcagtgatgcggagcgagggaccatctccgcctgcagggtcgacggctccatctgcaccaccatcaagacctatgctaaaaacccacgattcgtcacacttgatcctaagaatggtaagatgtactgggcggactggcacgagcggccggtgataatgtcagctcgcatggacggtagccaccacgacacgctggtggacaccttggagaacttcgccaccggcctggcagtggacgcgcccaacgggaggctgtacttcgtcgacaaaactgtcaaagtcgtcatgattgcagagaaacatgtttattctttatttgaagagccgttccaccacccgtactccatctccgtgttcgagaacacggtgttctggagcgactggacctccaacagcatacagacgactgacaaagtgcacgggaccgcgcagaagaggaacgttctactcaaacttgatacgcctgtactagggatgcacatgtaccacccggtgttgatgaacacgacatcgaacccttgcagcaacaacaactgctcgcacctctgcttcgtcacctccaacgccacgcacgtctgcgcctgccccgacggcatggagatcgagaataatcagtgtcatcatgtagggaactaccgtgccaagtacctggtggtgggaagtggacagctgttcaccaagatccagtacaacgcgctcggcaacccggagtgccacgccacgcacttcgacatcggacgcgtgcaggccatggcttatgatcggtacagagattctctattcatatacgacggccagcggcggaccatcaactacatcaacatgagtgacttcacgctcggcgtcacgcacttgttgatctacaacgggctggaaaatgtcgtcgacatggattatgattatgtgactgataacctgtacgttttggacgcgagtcgtcgtgtggtggaagctgtgtctctgaggactcagaagcgcgccatagtgcatcggttcgacattcaagaactgcctattagcttctgtattctttccgactacgggaggatgttggtggctgtggtggagagtgagatgcacaataccatacacattgacagcatcgggctcgacgggaaccagcggagacacgtcctcatgaacaatttgaaaggtccccacattagattgcggtacgtggcagaaacggaacaggtattcatatccgatgagagcaacggcatcatcgacttcatacatcctgaaggaaccgggcgagagaactatcgggagctcacctcgacggtgaccagcctcgccatagcagacaactacgtcttctggacagaccgaaagacccccaggctcttctggtctgacatacacgaggcctcaccgaagataaggaggatggatctggcccttttcccaaacaccacgcagctcctaatccaagccacaaactcgctacctgatccgaaagacccccttctgaaccatccttgtctgaagaacccttgttctgacgtctgtgtccaacttccccatgaaactccacaagatcacccgaaactggcaaacttcgagatgaagtacaagtgtttgtgcccacctggattactggttaacggtaaccagtgcgccaaacctgcggcgtgtggttcggatgagatactgtgccacaggagcaatatttgcgtgaagcaagatgctaggtgtgatggaaaggtggactgtcctaagagtgaagacgaggaaggttgtatagtggatccggcaaacatatgtacatcagatgagatattttgtcgcggcttgtgcataaataaggagaaagcctccatgtgttctactggtgaaaaacctaataaagcgctaccttcgaacaactgcagcagcacagaattccaatgcacggacacgtctatctgcatctctcggttgcaagtctgcgaccaacacgtcgactgccccaatggatcggatgaacatctctccgagtgtgacacctacgcttgtcacgaaactgagttcatgtgtgcgtccggctcgtgtatattcaagacgtggacatgtgatggagaccgcgactgtaacgatggatctgatgaaatcaactgcgtgaacatgacttgcggccctggtttctaccagtgcagagacagggagtgcgtagaactatcgaaaaggtgtgatggacgccgggactgttcggattactccgacgaagaagactgtgatgaggctcaagttatcgagaaagtagaagaagccccaaaatgtgctgcgtgggagtatacttgtgaaaaaaatactagcatttgcttgcctgaaactgctcggtgcaacatgaagacagactgcccaggtggcacggatgagcacggttgcgacctgcgctgcgccccaaaaggaatgtttgcgtgtgggcaacaggttacgtgtataaccttgaacaaagtctgcaacggccgtctggactgtgatgatgggtccgacgagacgcctgatgcttgttctcgggtgaacaggacctcccacttattcccagtgtcccgtacattcagcgactgtacggagggttacaagtgcaacaacggtcagtgcattgaatggtcacaggtgtgtgacaagaagagggactgtgtcgacggtacagatgaaaacggactctgtgatactgcatgtgcaaacagcacatgtaccttcatgtgtcagccgaccccattcggacggcgctgtctctgccccttcggcttccaagtgtcccaggatcagttctcgtgcgaggacatcgacgagtgcactgaagacgtctgctcccaaggttgtatcaacgtgccaggatcattcctgtgctggtgccatcatggttatgccatcaggaggtcagaccgtcgctcctgcaaggcgatccgcggcaacatgtccattctatacgtgtcgggtaactccgtgcggtctatctcagcggacgggtatgggtctatagagtacaccgatactgacgcctcggccatcactgatatggattataatgttaggcagaagaagctatacgtggcttcggaagagggcagcaagttattggaagtgaatgagacgcagaatgtgatcgcagtcaccaacgttgggaaaccatcgcgggtggcagtggactgggtgacaggcaacgtgtacttcgtggacacgactccgtacgaccagcgcatacgagtctgccacgtcaagaggaagcgctgcgcctccctgctgaaactgccgtctgatgccacggtcacagcattgatagtggaacctagttctagccgaatgttctactgcgtcactcggaagctggagtcagtgatctggacagctaacctggctggcagacacgtgactgacctggctactgtgcggaactgcaccggactggccgcagactctttcaagaagaagttgtatgttgcagagacgggcccagcacatatcattaggatggattatgaaggggagaatttcaacaagatcctctcagatcacccacgtcttcaagcgccacatggactagtaatcttcgaagactacatttactacttggaagccaactccttccgcctcagccgctgccagctatatggagccaagcattgtgaaacatatgtgtatcgcgtgtttgacgccaacacatttgtcattcgccacgagagcatccaacgtgatgacatcgtcaatgagtgtgaagatgtggtctgtgacaatatttgcgccgtggacgaagatgggcccaaatgtctgtgtgatgatggagctttggcgaagcgtgggaagtgtcccgaggttgataagaaactggtaccattattcaacggctggtcgtacgaggaactgaaatcagctcacagcgtctccttcaccatcatcgttggagtgctgagcctaatcgctatataccttggcgtgttcgtgtattaccacttcgtatacctacccaggaagagaatgctagctgccacttacactgaagtgcggttccagaacacaaatagttcgccctatcccgaatcagacccaactgtggagatgcatccctcaagttccgtttcacacgagttcataaaccctcttcagttcgtaagaaacatgtggtatgggccctttaggaaagatagacgaccaaattttaggaaagatagacgaccaaatgtaagtttaaacaccacttggcattaa

SEQ ID NO: 53 - DNA, 7020 bp, Spodoptera frugiperda
tctctacgttctcaatttccgttccgttgctcttccgccgtgccagcaaccacgtgtatcaattaaaataataattaatcaatttattaatttaataaatcaattttaataattaaacaatcgttattttttttacttattaagtatcaatgaaggaaatataaataatgaagtatcaaagcttggtattgatagttagtgtggcgtggtgctcggctcagctcacggatgacatgcagatgtttgagccggagtgcatgacggaggataagttcccctgcatgggaggagggtgtatctcggtgtctcagtactgtgacgggaacctggactgtgaagatggcagtgacgagaatttttgcatcgaacacaagccgttccaagagttctgtaacgagactcatcagtacatgtgtcaggactccacgaagtgtgttcctctgtcctggctgtgcaacaacgagccggactgtgatgacggcagcgatgagttcaactgcaccgcgctgccggctgtcaatgttaattcaacatgcaaaggcttccaatgtggagacggcaagtgtatctctttcctgtgggtctgcgacggcgtgtacgactgcgaagataaaagcgatgagtatgctgaggagctctgcaggcacgtgtcccgtccccacgccattgtcgacggctcgtactgccaggagctgcacacgatggatgaccggaactacaaatgtctggacgcctccttctgcctgccaagcagcatgatgtgcgatggactgcaggactgccgcgatggcagcgatgagggacctttttgcaaggactggaacacaatgtgcgacaacttcaaatgcatgggtaacgacacgcgatgctccccggagaggtacgggcccacctgcctgtgcctgccgtcccacttcatgcgccagtacgactacatcaccaagcaatgccaggacgtcaacgagtgcctgatggaacgtcccccgtgctcccacaaatgtatcaacgctgacggtcactatatttgcgaatgtgatcctgggtacaagagggatgtgtatggatacctttgttatgctactggtcccgaagcgatgctgttctttaatactcggaacgatatcagatacctgaaaatcaagagtaaagaaatggtcacagtggctaccgatatcatagagggtcacggcgtatcattcgatggcacttacatttactgggtggagacggcacagggacatcagtctatcttcaaagcgcagctcggagacgtcaaggatacaaaggaggtgctggtaggtctcggtctggaggaccctggcgacatagcagtggactacttaggcgggaacatatacttcagtgatgcggagcgagggaccatctccgcctgcagggtcgacggctccatctgcaccaccatcaagacctatgctaaaaacccacgattcgtcacacttgatcctaagaatggtaagatgtactgggcggactggcacgagcggccggtgataatgtcagctcgcatggacggtagccaccacgacacgctggtggacaccttggagaacttcgccaccggcctggcagtggacgcgcccaacgggaggctgtacttcgtcgacaaaactgtcaaagtcgtcatgattgcagagaaacatgtttattctttatttgaagagccgttccaccacccgtactccatctccgtgttcgagaacacggtgttctggagcgactggacctccaacagcatacagacgactgacaaagtgcacgggaccgcgcagaagaggaacgttctactcaaacttgatacgcctgtactagggatgcacatgtaccacccggtgttgatgaacacgacatcgaacccttgcagcaacaacaactgctcgcacctctgcttcgtcacctccaacgccacgcacgtctgcgcctgccccgacggcatggagatcgagaataatcagtgtcatcatgtagggaactaccgtgccaagtacctggtggtgggaagtggacagctgttcaccaagatccagtacaacgcgctcggcaacccggagtgccacgccacgcacttcgacatcggacgcgtgcaggccatggcttatgatcggtacagagattctctattcatatacgacggccagcggcggaccatcaactacatcaacatgagtgacttcacgctcggcgtcacgcacttgttgatctacaacgggctggaaaatgtcgtcgacatggattatgattatgtgactgataacctgtacgttttggacgcgagtcgtcgtgtggtggaagctgtgtctctgaggactcagaagcgcgccatagtgcatcggttcgacattcaagaactgcctattagcttctgtattctttccgactacgggaggatgttggtggctgtggtggagagtgagatgcacaataccatacacattgacagcatcgggctcgacgggaaccagcggagacacgtcctcatgaacaatttgaaaggtccccacattagattgcggtacgtggcagaaacggaacaggtattcatatccgatgagagcaacggcatcatcgacttcatacatcctgaaggaaccgggcgagagaactatcgggagctcacctcgacggtgaccagcctcgccatagcagacaactacgtcttctggacagaccgaaagacccccaggctcttctggtctgacatacacgaggcctcaccgaagataaggaggatggatctggcccttttcccaaacaccacgcagctcctaatccaagccacaaactcgctacctgatccgaaagacccccttctgaaccatccttgtctgaagaacccttgttctgacgtctgtgtccaacttccccatgaaactccacaagatcacccgaaactggcaaacttcgagatgaagtacaagtgtttgtgcccacctggattactggttaacggtaaccagtgcgccaaacctgcggcgtgtggttcggatgagatactgtgccacaggagcaatatttgcgtgaagcaagatgctaggtgtgatggaaaggtggactgtcctaagagtgaagacgaggaaggttgtatagtggatccggcaaacatatgtacatcagatgagatattttgtcgcggcttgtgcataaataaggagaaagcctccatgtgttctactggtgaaaaacctaataaagcgctaccttcgaacaactgcagcagcacagaattccaatgcacggacacgtctatctgcatctctcggttgcaagtctgcgaccaacacgtcgactgccccaatggatcggatgaacatctctccgagtgtgacacctacgcttgtcacgaaactgagttcatgtgtgcgtccggctcgtgtatattcaagacgtggacatgtgatggagaccgcgactgtaacgatggatctgatgaaatcaactgcgtgaacatgacttgcggccctggtttctaccagtgcagagacagggagtgcgtagaactatcgaaaaggtgtgatggacgccgggactgttcggattactccgacgaagaagactgtgatgaggctcaagttatcgagaaagtagaagaagccccaaaatgtgctgcgtgggagtatacttgtgaaaaaaatactagcatttgcttgcctgaaactgctcggtgcaacatgaagacagactgcccaggtggcacggatgagcacggttgcgacctgcgctgcgccccaaaaggaatgtttgcgtgtgggcaacaggttacgtgtataaccttgaacaaagtctgcaacggccgtctggactgtgatgatgggtccgacgagacgcctgatgcttgttctcgggtgaacaggacctcccacttattcccagtgtcccgtacattcagcgactgtacggagggttacaagtgcaacaacggtcagtgcattgaatggtcacaggtgtgtgacaagaagagggactgtgtcgacggtacagatgaaaacggactctgtgatactgcatgtgcaaacagcacatgtaccttcatgtgtcagccgaccccattcggacggcgctgtctctgccccttcggcttccaagtgtcccaggatcagttctcgtgcgaggacatcgacgagtgcactgaagacgtctgctcccaaggttgtatcaacgtgccaggatcattcctgtgctggtgccatcatggttatgccatcaggaggtcagaccgtcgctcctgcaaggcgatccgcggcaacatgtccattctatacgtgtcgggtaactccgtgcggtctatctcagcggacgggtatgggtctatagagtacaccgatactgacgcctcggccatcactgatatggattataatgttaggcagaagaagctatacgtggcttcggaagagggcagcaagttattggaagtgaatgagacgcagaatgtgatcgcagtcaccaacgttgggaaaccatcgcgggtggcagtggactgggtgacaggcaacgtgtacttcgtggacacgactccgtacgaccagcgcatacgagtctgccacgtcaagaggaagcgctgcgcctccctgctgaaactgccgtctgatgccacggtcacagcattgatagtggaacctagttctagccgaatgttctactgcgtcactcggaagctggagtcagtgatctggacagctaacctggctggcagacacgtgactgacctggctactgtgcggaactgcaccggactggccgcagactctttcaagaagaagttgtatgttgcagagacgggcccagcacatatcattaggatggattatgaaggggagaatttcaacaagatcctctcagatcacccacgtcttcaagcgccacatggactagtaatcttcgaagactacatttactacttggaagccaactccttccgcctcagccgctgccagctatatggagccaagcattgtgaaacatatgtgtatcgcgtgtttgacgccaacacatttgtcattcgccacgagagcatccaacgtgatgacatcgtcaatgagtgtgaagatgtggtctgtgacaatatttgcgccgtggacgaagatgggcccaaatgtctgtgtgatgatggagctttggcgaagcgtgggaagtgtcccgaggttgataagaaactggtaccattattcaacggctggtcgtacgaggaactgaaatcagctcacagcgtctccttcaccatcatcgttggagtgctgagcctaatcgctatataccttggcgtgttcgtgtattaccacttcgtatacctacccaggaagagaatgctagctgccacttacactgaagtgcggttccagaacacaaatagttcgccctatcccgaatcagacccaactgtggagatgcatccctcaagttccgtttcacacgagttcataaaccctcttcagttcgtaagaaacatgtggtatgggccctttaggaaagatagacgaccaaattttaggaaagatagacgaccaaatgtaagtttaaacaccacttggcattaaatgaccataagtagacagggtattcaaggtctattgaaaatttctagtactcattacttgtgtccaaccgatactggatttttgccaaaaccgaaaccgaactttgggccatggtttggtcgtggtggttatataatcttaatctagaaaaacaataagcatcttcataaaatcattcatgtatctttaatcataacaaatcaaagcattaaactgaagcatacatttgtcttatattttttacttttagccgaaactataccgaggccgaaacttaggatccggtttcggccagaaatccaatttcagtagacgctacataataagtacttttgaaattttcttgtcacacaatccaggcctatttgaatttaaataatcgttattttgtataaaataaatgtaatttgttgcaggtcatctccggtctaccagtcaccacgcccgcatccccgccgcaaccagatttctccgacacagaatccgacttagacgataaagagagtcagagaattttaaaatataattaattttattcaatgagcctacaaaataatttaatttttaatctgtagcacgtttatttttattcacttgattaatgatcaagctaagaattattttgtaattattatttttattgctttattttttatgttttaataatttaattattatgattgtgtgtaattgaattatgtgttttatattatgttagtataaaatgtacaaagtttaatttattgaaattaaaattaatgtaatttttcatagtccaatcatttggtattggtgattatacattttgataatattattcaccatcaatagcctgtgtggcagttcactgctgaacattgagggttagccacgatctcttttcgaatctcatctttattcattcatatcctggccagttcggcaagaattcatattatccacactaccttaaaatggataaactttttaaactatctttttcatacaaaatgactggactatgaatactgaaataattataattgtattgttatttatgaattatttattcgatttgcagagttatagataatacaaatcaataaattggtgtgccatcgagtaagtaattaatacttattccaataaaagtatcgcgtggaacagtttttgttattttcacattataaagacacacggatgccttgcgacttactcacttatttaatttatcacgaaaatagaaacgaacattttacactcacaatatgcaatacaaattgctatttttacaaaaacatttacgtaactaaaaaaacgcgccaaattatccataacggaagtagggagtctagtgttgtccacacatatgactatcaaactaaatacgatcactaattatttatatatttgcaaccaatagattttttcaactattcaacgttgtgttaaatgtgaataaattaatttaatttaattagtcaaaaaa

SEQ ID NO: 54 - DNA, 40 bp, Artificial Sequence
  Primer
tgttaattttgttctttgtgctttcaacgttattaaatgc

SEQ ID NO: 55 - DNA, 40 bp, Artificial Sequence
  Primer
caggaatgcttcgcttatacatcttccatttcgacaattg

SEQ ID NO: 56 - DNA, 39 bp, Artificial Sequence
  Primer
ctttcaacgttattaaatgcagtcgtttcaacgaataat

SEQ ID NO: 57 - DNA, 39 bp, Artificial Sequence
  Primer
atcacaatccagttcatccgatccatctccacaattgtc

SEQ ID NO: 58 - DNA, 39 bp, Artificial Sequence
  Primer
tcaccaataatatacactggcccaatggtttggctctag

SEQ ID NO: 59 - DNA, 40 bp, Artificial Sequence
  Primer
tatgatgatttttaccattaaacttatcacaagtttgaat

SEQ ID NO: 60 - DNA, 40 bp, Artificial Sequence
  Primer
agaggataacgtcaacatccacttagtgtcagtaacacgt

SEQ ID NO: 61 - DNA, 40 bp, Artificial Sequence
  Primer
ttgccgatagctcccatccagctggacatgcacaaactat

SEQ ID NO: 62 - DNA, 40 bp, Artificial Sequence
  Primer
aatattaattccactactattagtattccttggagcagta

SEQ ID NO: 63 - DNA, 40 bp, Artificial Sequence; identical to SEQ ID NO: 61
  Primer

SEQ ID NO: 64 - DNA, 40 bp, Artificial Sequence
  Primer
cctgtgtgatggtgaaaatgattgtaataactttttggat

SEQ ID NO: 65 - DNA, 40 bp, Artificial Sequence
  Primer
cgagtgaagatctatgcaagttttattgttactacacaag

SEQ ID NO: 66 - DNA, 40 bp, Artificial Sequence
  Primer
gtctgtgataataagttagattgtcccgattattctgatg

SEQ ID NO: 67 - DNA, 40 bp, Artificial Sequence
  Primer
cttgatttaaatctttagccactgtaaaataatctaaaga

SEQ ID NO: 68 - DNA, 40 bp, Artificial Sequence
  Primer
tagtgggaatagcatacgatggacatcatatttactggac

SEQ ID NO: 69 - DNA, 40 bp, Artificial Sequence
  Primer
gaacggtttgtcctgggatccatccataagtgaatatcca

SEQ ID NO: 70 - DNA, 40 bp, Artificial Sequence
  Primer
cactcgtggaagaacataaaaatttaatctatggaatcag

SEQ ID NO: 71 - DNA, 40 bp, Artificial Sequence
  Primer
caaatgtataaattattactttttggatcaaaatccattg

SEQ ID NO: 72 - DNA, 40 bp, Artificial Sequence
  Primer
cgatacggagaggctagtcgtagaaataattgatatgaat

SEQ ID NO: 73 - DNA, 40 bp, Artificial Sequence
  Primer
ttaaaacctatcgtaattttcttctcataagactcgctag

SEQ ID NO: 74 - DNA, 40 bp, Artificial Sequence
  Primer
atggttttacatgtaataaaagggtaacctgcgacaataa

SEQ ID NO: 75 - DNA, 40 bp, Artificial Sequence
  Primer
acaatgctcatctgaactatcagtacagtcatattctcca

SEQ ID NO: 76 - DNA, 40 bp, Artificial Sequence
  Primer
tcttcagaagtttgtcagtctaactattttaagtgtgaca

SEQ ID NO: 77 - DNA, 40 bp, Artificial Sequence
  Primer
tggttattattgcatactgaggtcatatttatgcatgcac

SEQ ID NO: 78 - DNA, 40 bp, Artificial Sequence
  Primer
cgattgttttgatggctctgatgaagatggcctctgttct

SEQ ID NO: 79 - DNA, 40 bp, Artificial Sequence
  Primer
ggaaattattgtaacaatcgcaagaatagcctccttcttt

SEQ ID NO: 80 - DNA, 40 bp, Artificial Sequence
  Primer
gaaagtatacacgaagtaagctacaaaggaggaccggtta

SEQ ID NO: 81 - DNA, 40 bp, Artificial Sequence
  Primer
tagcttacaactgactatataaccagttgcaacagtatag

SEQ ID NO: 82 - DNA, 40 bp, Artificial Sequence
  Primer
tatggagacagatcctgcaatcccagatataaattacaca

SEQ ID NO: 83 - DNA, 40 bp, Artificial Sequence
  Primer
tcttcggccacaattatcggatttgtgtactcgtgttgtc

SEQ ID NO: 84 - DNA, 40 bp, Artificial Sequence
  Primer
tcttgtaaagctcacggaccaagaatgaccatatacttag

SEQ ID NO: 85 - DNA, 40 bp, Artificial Sequence
  Primer
ccatccaagtttacactgtatattacgaagcttggtgttt

SEQ ID NO: 86 - DNA, 40 bp, Artificial Sequence
  Primer
cgccatgcctgagggctacatccaggagcgcaccatcttc

SEQ ID NO: 87 - DNA, 40 bp, Artificial Sequence
  Primer
ccaggatgttgccatcctccttgaaatcggtgccggtcag

SEQ ID NO: 88 - DNA, 40 bp, Artificial Sequence
  Primer
atgttacgtcctgtagaaaccccaacccgtgaaatcaaaa

SEQ ID NO: 89 - DNA, 40 bp, Artificial Sequence
  Primer
ttaaaactgcctggcacagcaattgcccggctttcttgta

SEQ ID NO: 90 - DNA, 20 bp, Diabrotica virgifera
aactctcgaaactgatggcc

SEQ ID NO: 91 - DNA, 23 bp, Diabrotica virgifera
caaacgatcttgttactgcatcc

SEQ ID NO: 92 - DNA, 147 bp, Diabrotica virgifera
aactctcgaaactgatggccattgcgaagatggtcattggaagtgtgccgataaattgtgtattccacttgacatggtatgtaatggcgcacctgaatgtttggatggatcagatgaaactattggatgcagtaacaagatcgtttg

SEQ ID NO: 93 - DNA, 20 bp, Diabrotica virgifera
tgggaaatagccacatcgac

SEQ ID NO: 94 - DNA, 22 bp, Diabrotica virgifera
cccagtacttagatcggcaaag

SEQ ID NO: 95 - DNA, 140 bp, Diabrotica virgifera
tgggaaatagccacatcgaccgttttttcatggatggtactggaagaactcacgtcatcgaaaacggtttagtgggcccagttcgtgtagtatacgaccgcagtctttatagaattttctttgccgatctaagtactggg

SEQ ID NO: 96 - DNA, 18 bp, Diabrotica virgifera
acacgtttgccagtggtc

SEQ ID NO: 97 - DNA, 25 bp, Diabrotica virgifera
tgtgtccagtacaaacattttctac

SEQ ID NO: 98 - DNA, 78 bp, Diabrotica virgifera
acacgtttgccagtggtcaatttgttattgagcaggaatcgcttcagcctaaagtagaaaatgtttgtactggacaca

SEQ ID NO: 99 - DNA, 23 bp, Diabrotica virgifera
ctaactctggcatcgaatacctc

SEQ ID NO: 100 - DNA, 20 bp, Diabrotica virgifera
tgggcgtttcaaggtagatg

SEQ ID NO: 101 - DNA, 77 bp, Diabrotica virgifera
ctaactctggcatcgaatacctccgcacattcttacacttacctggagaaattgtcccatctaccttgaaacgccca

SEQ ID NO: 102 - DNA, 474 bp, Diabrotica virgifera
atgttgatgccaaaaaagaatagagtatgtatttacgaatacctcttcaaagagggagtcatggtagctaaaaaagattaccatgccccaaaacacctcgaactagaaactatccctaaccttcaagtaattaaggctttacaatcacttaaatcaaaaggttacgtaaaggaacaattcgcctggaggcattattattggtatttgactaactctggcatcgaatacctccgcacattcttacacttacctggagaaattgtcccatctaccttgaaacgcccagcaaggacagaaaccacccgtcctagaccagctgctctcagatctgagacatctaaaccttcagaagaccgtgcaggatacagaaggactcctggaggccctggagctgacaagaaagctgatgttggtccaggaactggagatgttgagttcaggcaaggattcggacgtggacgggcaccacaataa

SEQ ID NO: 103 - DNA, 570 bp, Diabrotica virgifera
ggggctttctgatttttgacagcttctatagaagtttatcaagatgttgatgccaaaaaagaatagagtatgtatttacgaatacctcttcaaagagggagtcatggtagctaaaaaagattaccatgccccaaaacacctcgaactagaaactatccctaaccttcaagtaattaaggctttacaatcacttaaatcaaaaggttacgtaaaggaacaattcgcctggaggcattattattggtatttgactaactctggcatcgaatacctccgcacattcttacacttacctggagaaattgtcccatctaccttgaaacgcccagcaaggacagaaaccacccgtcctagaccagctgctctcagatctgagacatctaaaccttcagaagaccgtgcaggatacagaaggactcctggaggccctggagctgacaagaaagctgatgttggtccaggaactggagatgttgagttcaggcaaggattcggacgtggacgggcaccacaataaatttattgataagttaatttttataaattgatcagccaataaaaagtttggtt

SEQ ID NO: 104 - DNA, 155 bp, Artificial Sequence
  Primer
cgccatgcctgagggctacatccaggagcgcaccatcttcttcgaggatgacggcaactacaagtcgcgcgccgaggtgaagttcgagggcgataccctggtgaatcgcatcgagctgaccggcaccgatttcaaggaggatggcaacatcctgg

SEQ ID NO: 105 - DNA, 155 bp, Artificial Sequence
  Primer
atgttacgtcctgtagaaaccccaacccgtgaaatcaaaaaactcgacggcctgtgggcattcagtctggatcgcgaaaactgtggaattgatcagcgttggtgggaaagcgcgttacaagaaagccgggcaattgctgtgccaggcagttttaa

SEQ ID NO: 106 - protein, 1770 aa, Diabrotica virgifera
MLILFFVLSTLLNAVVSTNNNDCPPHQFRCTNSKCIDFQQRCDGSDNCGDGSDELDCDHKCHEHFFNCRNGRCISEAFLCDGENDCNNFLDEKDCKGQTVLTLETDGHCEDGHWKCADKLCIPLDMVCNGAPECLDGSDETIGCSNKIVCDGFKCKNGHCIPTEWACDGLDDCGDKTDEQDCANHVPLDQCTLDKRKFLCSNNKTCIDLHSVCDNKLDCPDYSDEGKQCNSSAISCNNNKCSHTCISLPTGPKCLCPNGYHTLDDSNCLDINECTTYGICDQKCRNLPGSYECYCDDKYTLQADKKTCKATGGSGIMIFSSKQEIRALTLDSLDYFTVAKDLNQVVGIAYDGHHIYWTDVFTGHETISRSIEDGSEREVLVTSGLSLPEDLAYDWLTGNIYFTDALKQHVGVCSNDGHHCTVLVNKDIRKPRGIVVNVEAGDMYWSDWGVPAAIGYSLMDGSQDKPFVTNNIHWPNGLALDQPNSRLYWTDAKKMTLESINLDGTDQRIVLEGIVKHPYAIAVFENKLYWSDWDSHTIQTCDKFNGKNHHTLVEEHKNLIYGISIFHYALEKRLVNPCEHASCSDICLLKAQSYACACPENKVLDTDGHTCKEVQPTQALVGGTGHVLVSIKHQFLGKHDVTFLPDLAKHVGSLAFDSYKNILYVSDLETKSIVALNMNIGISKTLEIDGLGKVTSMDFDPKSNNLYICDTERLVVEIIDMNNLERKIIVHDTFGETPESIALVPEDGIMFVSFKQGKLGNSHIDRFFMDGTGRTHVIENGLVGPVRVVYDRSLYRIFFADLSTGVIESTSAAGDDRHHFRTLTTHPVSIAVLKDDLLWTNLDSKDLYWSEKRSSESYEKKITIGFKEDNVNIHLVSVTRKQLEINSCRVNNNGCSHLCLQSHKSIVCACPAGWELSANGFTCNKRVTCDNKEMLCPHSNTCVLKSLRCNGFKDCAFGEDEWDCQTVSQCLPGQYKCDDGQCISEDLVCNHSYDCKDKSDEYGCADKNKKLGCPPGHFTCKSSECISERFVCDAFHDCDDGSDELNCENNICLESQFRCDVGTCIPKDWECDGEYDCTDSSDEHCSSEVCQSNYFKCDNNRCIDPKLQCDGFDDCGDHSDEKFEKCLHHSKAPKCTLEEFACITNTSICLPKSAKCNGTSECPNNEDEKDCSKCEEDEFECKHKHYRECIPRSWICDGTDDCGDNSDESMETCSSKLKPAADNFAVTDSCLTGYRCHSGACINMTSVCNNNHDCFDGSDEDGLCSSSCVGVKNPCNQICVKTPSGPRCECKPGYKLLGDGKTCIDDNECQTDPPICSQLCHNKEGGYSCDCYNNFLLSSNKKSCKAHGPRMTIYLVIYGNQIRHLIPKSNTMAVLYTNPMIKISSLDTLVKPKLIFFSSYETQAIYKLDTTTNMMHYIRNVGFPRTIAVDWSTQNIYYFDTDVNGRSISVCSFEEKCAKLINIESPRHVTALAVDSVNKLLFYVLRNWWVLETPSFVIYSVNLDGSNRQEIVKTTTGNVEDITFDINKKLLYYTNKQDESIHEVSYKGGPVKTVFSNISQPEGLKFFENQLYYTVATGYIVSCKLYGDRSCNPRYKLHTFASGQFVIEQESLQPKVENVCTGHKCPYLCVPAESGYRCLCHNGKVSNHSEICGENDDNQSGNNHKFAVHTTPIQTASDKHSGAVASAILIPLLLVFLGAVFYYLLKRRGDTGLNISMRFYNPLYGKPVREDQKQILKPGQHEYTNPIIVAEEHEDHAKDASRMLNDSCVC

SEQ ID NO: 107 - DNA, 5498 bp, Diabrotica virgifera
taccacagtcgacatctgacagtttctacagtatagttgcagtgttcagtggaaaatattcaattaaggaacctatatattgttgactctgctacgcccgtcatgttggcacaactctcgattatgttccgaacagtgtttgtgggattctgaaaaaccagagcatcgtgaacgttcaggacaatagtattctctcttggtgaatagacagacttactgactgtacgcaatagcaccggtgtaaaacttgatgacgttgatgatgatgaagccatcgcaagcaataacaaaaacaagcacgaacgaaaggttaattacaatagcactgatagtatcgtttcttggtgattcatgtatgattgtgactaatcggtttgatagaaagaaagatttattgtaactcctttcctcatcgaccttaaaaagtatatactacaatcaaaatcgttttcaaagaactcaaagggactggcgagctttggccgttgtagccgtgttctgttttatggcgttctatcgtttataatgaacagtttgctataaacgacattacactagttacaaatcagttcgttgtaagtttatgatgcaaaatggaaagatgtatattgcaggactatgtgctaatagaactgaagtacttcggaaaataagcaagaattagctcagagtcataacaggtttccttacaagacaagtcaagttcccctatgggaaaagaagtttgaaaataacgaaacctggtggtggtcaaagaagttcaataaaaagaaaaagagaagagaaaactatataaacagtggcaagaaaatagatcgcacatagagaggaagcgaaagcagcaaaagctaaagcagatgtgtgtacaactctatacgatcaacttgacatcagttagaagtaagaagtttacgtcagagagattgtaatttttctatgaagaaattgtttttcgtatcattagtttagtttgttcagtgaaagagaaaatgaaaaaacaaggtggaattttaaggttataccgcacacctggttgtacagcagcaaaaaagtttgaaattgtccagaaacttcagcaaacatgtaaaaatctaaaggatattcaaaccgaaatatgttttcatatcgaatcaacaagtgccttggaagcaaaagacgttaagattttgaaatgggttcttcaagatcctctccatccccaaaatttaagcgaaaagggaacgctggtagcgaaaaatggtacggctttggttgaggtaggacctagatttaatttttccacatcaagttccacaaatgctgtttctatttgccaaaatctcggcttggtccaagtaaccagattagaggtctcacgtcgctatcttttagtgtttaatcaaggtacaaaacttacacctcaaattgagaataatctagcatctttactctatgatagaatgactgaatgcaggtatactccagaaaatatacctaaagttagctttaatgaaaaacttgtcaaaaaggaggatataaaagagattgatatattgggtaaaggtgcagaagctttaaaagccattgataaagaacttggtctggcgttcgatgaagcagatatagtatattacacaaatttgtttaaaaatgttcttaagaggaatcccactaatgttgaatgctttgacttggctcaatctaacagtgaacacagtagacattggttttttaagggaaaaatggttattgatggtgtagagcataagcaatcactgatagatatgattattgaaactcaagaacacacaaatcccaacaatgttataaaattcagtgataatagtagtgcaattaagggattcttacaccgaagcttaaggcctgtaacagcaggttctctcagtgagcttaagcaagtaccagtagaatctcatcttattttcactgcagaaactcacaatttcccgactggtgtagctcctttcagtggagccactacaggaactggaggaagaattagggatgtgcaaagtgtgggaaggggtggttattgcatagctggtactgctggttattctgtaggcaatcttcagattccagattatgatctaccatgggaagacaaaaacttctcttatccatcaaactttgctccacctttagaagttctagttgaagccagtaacggagcctcggattatggtaacaagttcggtgaacccttgatttccggcttcgtacggtcctttggtcttgttgacgcggctggagagagaaaagaatggattaaacctatcatgtttagtggaggtattggcagcatggaagccgatatgactgagaagctgccacctaaattaggacaccaaatcatcaaaattggaggacctgtatacagaattggtgtaggtggaggatctgctagttcagtcgaggtacaaggggacaacaaagtagagttagactttaatgctgtacaaagaggtgatgccgaaatggaaaacaaattgaacagagtcgtacgtgcttgcttggaactaggttccaaaaaccctatcgtcagtattcatgaccaaggagctggaggcaatggaaatgttttgaaagaattagtagaaccagtaggaggaattatatacgccaataaatttgatttaggtgatccgacaataaacgttcttgagttgtggggagccgaatatcaagaaaataatgcgttgttgtgtaaaaaagaagatcttcctcgtcttaagagtatttgtgcaagagaaagatgccctgttaacgttgtaggtgaagtaactgatacaggaagagtagttctggctttagacgaaagcaaggctgttacaccgtttaatttggaattggaacatgtattaggaaaaatgccacagaaagtcttcaagttaaacaggcacaaagtagccagtaaaccactagaattcccaaaagccctttcaatctaccaatctctgctgagagtattaaggttgccatctattggaagcaagcggtacttaacaaacaaagtagatcggtgtgttacaggtttgatagctcagcagcaatgtgtgggaccactacatacacctttagctgatgttgctgttacggctctttctcattttggacatgaaggtatagcgtcatctattggagagcaacctatcaaaggtttagtgaacactgcagccggtgctagaatgacggtagtcgaagctttaagcaacctcgtattcgccggtatcaccagtttacgcgacgtcaaatgcagtggtaactggatgtgggctgccaagctccctggcgaaggagcagctctgtatgacgcatgcaaagctatgtgtgacctcatgagcgagttaggaatcgccatcgatggtggaaaggattctttgagtatggcagctagagttggaaaagacactgtcaaagctccaggaaccttagtagtttctacttatgctccttgtcctgatattagaaaagttgtgacccctgatttcaaagcgccttctatgggaaaaacaggaaccattctgttcgtagatctttcccgaagtgacagtagacttggtggttcggcattagctcaagcatttggtcaacttggagaggaatctcccgatcttcatagcgctgaagaattagtaaatgcatttaatgcaacacaacagttaataaaagatgattcaattttggcaggacacgatatcagcgatggtggcttaatcgtatgcctattagaaatgtgcttcgcaggaatatgtggtatggaagttgatgttcaacatagacaaggcaaaccacttaatattttgtttgctgaagaagttggatgggtactggaagttttggatgaagatgttgctcactgcctgaatgtgttttcgaatcacaacgtcccagtattcaaaataggaaagactgttggatatggagttaaatctaaatttggaataatagccaaccatgcttgcctagaaagtacaattctacctttgatgaagctttgggaagagactagttataggttagaactacatcagactattaaatcctgtgccgattcggaattccatagtcttccaagccgaactggacccaaatacacacttacattcgaccctgatcacgatcagactgtaaaagacgaattagttcccgtagctgtgataagagaagaaggaacaaacggagatagggaaatggctgctgcgttgataagagccgggttcaaagtgtgggatattactatgcaagatctgttgagcggtgtggccactttggataggtttaggggcgtgatattccctggaggtttcagttatgcagatgtcttgggttctgctaaaggctgggcggccagtattctattcaacaaaaccgtccgagaacagttcgacaaattctttgccagaagagacacgttcagtttgggagtatgtaacggatgccaattgatggctcttatcggttgggttggaacacctgttaatgaaggtactaaaccagacataatgttggaacataatttgtctgaaagattcgaatgccggtggagcactatcaagatagaaaaatccaaagctataatgatgaagggtatggaagggtcttcatttggtgtgtgggtcgctcatggagaaggtcgattcacgttcaaatcagacaccatctacgaccaattgaaatccgaagaactcgtcgccttgcgttacgtagacgataacggaaaaccgactgaaatctatcccatgaatcccaatggaagtattgagggattggcgggagtgtgctccgaagacggaagacacttagcgatgatgccgcatcccgaaagatgcgttcaaccattccaatggccgtacatgccacaaagctgggtacactacaagaagagtccatgggagaagatgtttagaaacgcttatgaatggtgcagaagcaataaattccataatgtttattattaagttaaaagaaatattgtaaatatttcaatgatctagctcaaattttataatgtttatacacattttgaagttattctattttagatatagcagtttcgaatgtagagttgagtccatggatatttacccgtgcgtcatcatttacagcatacgaaataagtcggaaatttacttaacgcaacagcaagtgacagaaagtggctactgctccgatgacggatattataaaatttgacattatcaaataaatagaatgtaaaatgttagttttgctttaaaattttggtgcagaattaacactacatttgaagtagcttaataaattattttaatatcattactgattaataaatacttaaataacaatttttaaaaaatttaatgaaatatatatttttgttatttctttcacttttgcggaaacttaaataaaaccattccttaactgtgtgaatgaggttaactttgtatgtaaattaatggcaaaataaaatacacttaccataaaatttcaaactccaatataaaattagttgt

SEQ ID NO: 108 - DNA, 1875 bp, Diabrotica virgifera
ctccgtttagcgagcggaataacggcgtcgaatcaaacggaaagacaagagattgacctctctaaataatccatctgcttgctatcagccagcgagcaagctacacacggcccaagacgaaagaacgaagaaccttcgccttctctccttcgccagttcagtatcccttcagcgacgctgtgcatcgttgctggtttacaacagtcgttgtagttcttcccaccttttcaatcgctaactcaacggttgaaaaccgacgatatatcctgcctctgcctttgcctcatcgagtggggagaaatacgggcagacaacgatctgtgtaatggcaatggcgttgtacagactatcagaactgaaatcatggcctagttccctttaaaagttcagaaaacagtgaattcgcgtggatagtgaaactggtgtaaatgagtgataaaaatttaataattctacgatggctgaagcagaaaacatcgatttccaagcatgttgcagactgtgtctcagcgaaatggtggattctttaaagtccattttcgacgaaactcctgaagatgaaagtctctcccaaaagattttacaatcagtggctattgaggtcagttcggcagacaaattatccaccaagatctgcaaagagtgcgtagaaaaagtaactgactggtcttcgtacaaagaacgatgtctccaaaaccaaaagaaattaacggagttgttagttgcgaaagaaggtccagaagttttggttgtacctgaaattatacccgaacccgaagcaccacttcctgtaaatggaattgaatcagaaactccttctgatgacgacattcatgaaaaccaagtggatcctgcctctttgttggaccttagcttgcaaattaaagaagaaccagcagaccacactgaacagaacgaacacgataacccatatctagcatatttgggttatcgtgttcgttctgttcagtgtggtctgctggttcttctttaatttgcaagctaaggtccaacaaagaggcaggatccacttggttttcatgaatgtcgtcatcagaaggagtttctgattcaattccatttacaggaagtggtgcttcgggttcgggtataatttcaggtacaaccaaaacttctggaccttctttcgcaactaacaactccgttaatttcttttggttttggagacatcgttctttgtacgaagaccagtcagttactttttctacgcactctttgcagatcttggtggataatttgtctgccgaactgacctcaatagccactgattgtaaaatcttttgggagagactttcatcttcaggagtttcgtcgaaaatggactttaaagaatccaccatttcgctgagacacagtctgcaacatgcttggaaatcgatgttttctgcttcagccatcgtagaattattaaatttttatcactcatttacaccagtttcactatccacgcgaattcactgttttctgaacttttaaagggaactaggccatgatttcagttctgatagtctgtacaacgccattgccattacacagatcgttgtctgcccgtatttctccccactcgatgaggcaaaggcagaggcaggatatatcgtcggttttcaaccgttgagttagcgattgaaaaggtgggaagaactacaacgactgttgtaaaccagcaacgatgcacagcgtcgctgaagggatactgaactggcgaaggagagaaggcgaaggttcttcgttctttcgtcttgggccgtgtgtagcttgctcgctggctgatagcaagcagatggattatttagagaggtcaatctcttgtctttccgtttgattcgacgccgttattccgctcgctaaacggag

SEQ ID NO: 109 - DNA, 3249 bp, Diabrotica virgifera
tgattttgatgaaaaaaaatctgatgaaatagtagccatgaactctgacctgggagaaaaaatattattcgaaaaaactgtaacatgccagggaggtgtcgaaatttggctgaaccatcttcttaatgccgtcagagacaccgtcaaaaacgtctgtgctatgcaggctcagtgttttaatgatcctgaatacgacttcatatctggattcgttcatttttgtggacaggctggactagttggtatacaaatattgtggacaaaagaatccgaaattgctattaagaaagcaagagtagatagaatggctatgaaaattacaaataaacgatttctcgacctcttaaatgctctcattgatcttacatcaaaagatttaacaaaaatgcaaagaataagatttgaaaccatggttactatccacgttcatcaacgagacattttcgacaacatttacaagttaaaagttaagtcattattggattttgaatgggcttgccagacaaggttttactatgatgaagagacggatgatataactgtgaaaattacagacgtcatctttttataccaaaacgaatatttaggaataacagagaggctggcgatcacccctttaactgacagatgttacataactttggctcaggctatttggattaatatgggaggagcacccgctggccctgctggaacaggaaagacagaaacagtcaaagatatgggaagaactctgggaaaatttgtagttgtattcaactgctctgaccaaatggattttagaggacttggtcgaattttcaagggacttgctcaatcaggaacctggggatgcttcgacgaattcaacagaattgagctacctgtgttatcagtagctgctcaacagatctacatagttttagaagcaagaaaagcacgcaagccatcgtttatcttcatggatggagacaacgttagtatgaatatagagtttggtatattcctcacgatgaatcctgggtacgcaggaagacaagaattgccagagaatctgaaaattatgttccgaagtgttgctatgatggtccctgatagacagatcatcatcagagttaaactagcttcctgcggctttaaagaaaatgttcacttgtccaagaagttctttaccttgtatcagttatgtgaagaacaactttctaaacaggtgcattatgattttggccttcgaaatattttatcagtgttgagaacacttggagcacaaaagcgagcaaatccaaatgaaactgaagaagtcgtagtaatgagagttttaagagatatgaatttgagcaaactaattgacgaagatgaacctcttttcctttccctaatagaagatatgttccctggtattaaactaactacaaaagcttggaaagacctgcaaaaagctatcacgcatatatgccaagagcttggtttcgtcaattatccttcgtggaatcttaaggttgtgcaattgtatgaaacctctttggtacggcacggactaatggttatgggtcccacgggtgcgggaaaaacaaaatgcatgttaactctaatgaagtctatgacagaaatgggtatgcctcatagagaacttcgaatgaatccgaaagcaatcacggctccccaaatgtttggaagattggatgttgccacgaacgactggacggatggaatcttctcaactttgtggagaagaactcttaaatttaagaaaacagactattgttggttaattttggatggtcctgtagatgcagtatggatagaaaacctaaactcagttttagacgataacaaaactttaactctagccaatggcgacagaatagtgatggcaaataactgtaaattggtattcgaaccggacaatgttgataacgcaagcccagccactgtatcccgaatgggtatggtattcatgagttcttcggtccttccttggtcaccgatcttagaggcttggttgaaaactagatcagcgcaagaagctgattctatcagaaatcattttaacagatgctatgatgaccttcacgttttcgtgcagaccagattaaaagccaagatgtttgtaagggaagctctgtacgtaagacagtgttacgatgttttacaaggggtattagatatctttgaagaaccaaaaacatggagtgatagacaaatagaacgattggtactattctcaataatgtggtccttgggagcactgttagagttagacgacagacaaaaacttgaagaatttgctttaacccacccgtccaaaatggattggccaaaagctcaggaaggagaaaccatttttgaatttgtagttaatccagacaatggaagatgggaacactggaaatccagagttgaaccctttgtatatcctacagataccgtgctagaatttacttcgatattggtacctaatgttgacaacgttagaacagcctttttaatacatacgatagccaaacagggtaaagctgtattgctaattggtgaacccggaactgccaaaaccgttatgattaagggttattgctcaacttttgatcctgaatataaactgaacaaatgctttaatttttcttctgctactactccaaacatggttcagcgtatcatagaatcttatgtcgataagagagttggtacaacctacggacctcctgccggaaaaactttaaccatatttatagacgacattaatatgcctgtaattaatgattggggtgatcaaatcacaaacgaaatcgtaagacagtgcatggaaactggaggattctatagtttggataaaccaggcgatttttcagtaattgctgacgttatgtttctgtctgctatgattcatcctggaggtggtagaaatgatattccccaccgtctcaaaaggcagtttagtatattcaactgtacactgccaagtacttctgctatggatgttatattcagtcaaattgcttgcggctacttttgtctagaaaggtttaacgaagaaatggcagagtttattccaaagctagtaccacttacgcgacatgtatggcagaatacgaagaaaaaaatgttacccactccagccaaattccattatgtatttaatctacgagatctttctagaatatggcaaggaatattgacagtccaagtgcttgagtgtccgactaagaatatggctcttaagctctggagacacgagtgtactagagtaatttcagataggtttactgaagc

SEQ ID NO: 110 - DNA, 1370 bp, Diabrotica virgifera
cttaaacataaccttcaatttgtaatgtggttttaaaattcattccttaactttaaatttatttattttcaattaggaaaattaggctataacgtcgaaaaatgtccaaaaaacgctataattggaaagctaggcaaaatgttgaaactctggttgataatactcataaagaaaaggaaatggctcctccaccatacgcagacctcggcaaaagagcaagagacgtattcggcaacggttatcactttggcctaattaaattaaattgcaaaaccaaaacagccagtggggtccaatttagtacaggtggtagttcagaccatgaatctggaaaagtgtctggatctttggagagcaaatacaccgtcaaagattatggattgactttcacagaaaaatggaatacaaataatactttggggactgagatcgccatttcagaccaaggtattaagggactcaaggtctctggtaatgttaacttctccccacaagaaggataccagtcaggagttgtgaagtctgaatacggcaacgaaagaatacacctcaacgccgatgttgacttaaatagtaacggacctgtcgtaagaggttcggctgtcgtgggctatcaaggatggttggctggttaccaggctgcctttgacgttcaaaactcaaaattggccaagagcaattttgcattaggattttcaacatcagactttgttctccatacatgtgttaacgacggccaaacgtttggcggttccatctaccaaaaaatcaaccccaaattggaaacagccatcaacttgtcttgggcagctagcggagaaaagaccgacttcggtttgggctgcaagtatgacttggacgccgacgcatctcttcgcgctaagattaacaacgccagtcaaatcggtttaggataccaacaaaaactacgtgatggtgtaactctaactttgtctaccctcatcgacggcaagaacttcaatcaaggtggtcacaagattggtttggccttggacctggaggcttaaatatgttattacatcttgttccacaaatacatattagcgcccatttaatatatttaagaatcctgtattgtagataataattatttaaacgggactttagtgttatactttattactcccgttgtgtttatttcagttgctcctcccaattactccttttttacacgctatacgtatatattgtttttattattaaactctgaaaggcgcgcttttctggatattttcaaagattgatgtcaagttaggagcatatgcattttatgtcaaaaaattagattgggattgtgggtcttagatggctacaatccgctttgtgtagttttgcaattttgcaaaaaa

SEQ ID NO: 111 - DNA, 1194 bp, Diabrotica virgifera
acccattggggaacgcacgcattttgtttagttccggcgtctttgctcaagttttgcccggttgttgctgtgtttggtttgttggtgcattttattattataacaagttcattacaatgggcaaaaagaaggtagaagagagtgaaagtgaagaggagtattctgtagagaaaattattgataggagagttgtagatggaaaagtagaatattatctaaaatggaaaggatattcagaagatgataacacttgggaacctgaggacaatctagattgtcctgaacttatttctgagtttgagaggaatcgtaaaagtaagaaggctgctggcaaagaaaagaaaagaacaagagataattctacatcttccgtggattcaaacaattcatccactaaagaaaaagaaaaaaagaaaaagaaaggccgttctccatcacccgagtctgaaagtgaacccagctctaaaaaatcaaaaatagatgattcagatgatgacaaaaagagcaaaaagaagtcgtcatcaaaagatgctgattccgatgatgataaaggaaaaaagtcaaagaagaaagacaaaagtgctttagatgatgactctgacgatgagaagtcaaaaaagtcaaaaaaaaagattctgattcagaagatgaaaaaaagaaaaagaagagaaaaagtggtcctaaatctcgtaaagctgccgtttcagatgactcagatgaagatgaagccccaaaaaagaaaactgaaagtcgggcgaaaaaagatgatgaaaaatccaagaaaaaagctgatgattctgatgatgaagatgatccgaagaagagcaaaaaagttgacaacaaggaaaaaaagggtgctaaacctaaagacaaagagaagtctgcatttgacaaaggtttagaagctgataaaattattggagcatctgacactagtggtcaattgatgttcttgatgaaatggaagggtacagatgatactgatttagtttatgcaagacaagccaatttgaaatgcccacaggtggtcattaaattttatgaagaaagaattgcgtggcatacgccagacgacttttaattttacttagtgataagatttgttgtagatttaatttcttacttttaaataggtagagttcttatattattaatccatatgtattttttttaaatggaagaaaccacgacttg

SEQ ID NO: 112 - DNA, 1802 bp, Diabrotica virgifera
gggggagaaaacatatgattgcccagactgacagtaattcgatattttgaattaattgaactgaacacttctattattaaaactaatcaaaacactcgaaacagatacgtaatgcagttataatgagttttataattattgcttttaaaaatttcctacataccatgttgcagttattatcttttggtaaaaaaactattacaaatagtttgagtgtgtatgtaaaaactattggtggcaacactttaactgtagatctagatcctacatgggacattaaaaatgttaaggaaatagtggcaccacaacttggattagaaccagatgaagtaaagatcatttttgctggaaaggaattgggagacgaaattaaaattgaggaatgtgatttaggtcagaaaagtattctccatgctgtaaaaattagaggaaagaggagtaagcttattcaacctacaaatagtagtgtaatagaggaaaatgaagatccaagtagcaagccattgagtgaggttttagatgatagtatgttctctcatgaagacagcaattcttttaatagtacaactgaaaggcggtcatctcaatcagaaagtggtttaattaagtcaaaagtacatttctatgtattctgtccaacatgtaaggcaatgaagtcaggaaaaataagagtaaggtgccatttttgtaaaagtggagcgatcactgtacatgctgatccccaaaactggaatgatgttctaatatcaaaacaaattacaggaacatgtgaaaatagtccagaattatgttctaacctattaaaaaacgtagagcctacttttgctgagttttacttcaaatgttctgaacatacatcattaggggaacaagatggagcagtgccactagatctaataaggccaaatttaagggacattccctgtttagcctgtgcggatgttagcgatcctgttcttgtctttccttgtcaagaaaaacatgttacatgcctggattgctttcgccaatattgtgtgaccagattaatggaaagacagttctggcaacatccagagctgggatacacgttggcttgtccagctggttgcctagactcgtttataaaagaagtccatcattttagattgctcacagatgctcaatatgcgcaatatcaacgtttcggaaccgaagaattcgtcctcagatccggcggagtactgtgccctcaaccgggttgtggaatggggattttagttgattccagttgtaacaaggtggcgtgtataaacggttgtggttacgtattttgtcggttatgtttacaaggctatcatatcggcgagtgtcgaccatccgatatggacagttctgcaggtggtgaaggatgtttgtacagcgtagacccaaatcgagcatcggacgcaaggtgggacgaagcttcgagagttaccattaaagtttccacgaaaccttgtcctaaatgtaggacacctactgaaagagatggcggctgtatgcacatggtatgtactagagcagggtgtgagttccattggtgttgggtgtgccaaactgcatggaccagagattgtatgggaagccattggtttggttaagacattgaaaaatatgtgatattaataaactaaaaaatgtgtgttcttttgattgtacagttgtgtttcacttaacaaaggttgtttggttattttttgctatgtttgaatcaacagaccttaaaatgccgttctgtgtcatacaaaagagaccacagagtacagaagaagaatcatcagatctattatagatatagaata

SEQ ID NO: 113 - DNA, 15730 bp, Diabrotica virgifera
agcaaatggcatggcagattacaatggcagcgagcagtggcggagtagattggacgactgtcttaaaaccattcttatctaaaaattatgagacttctaatacagcagaactgatagaactatgttcagctattgtaaaaagcgaatccgaaatcttgcgacacaaagagagtaataagaatttcttcaattcctttgcggttctagcttcagattatattagcagtagtactagtggtttacttgcgagtcaactagaaacggtaaacgctgcatgtcgtatactattaaagtatctgcttagtgctctcagtagcgcatgtagcgaaaccaatccgagcagtgcccaaatcgaacgatatttaaatgctattaaagtactttgcataggtactggactgctgtccaccacggaggtcaccgtcctcgtcgacagtatgaagggagaaaatttaccccaacagaacccagtgccttcaggaaatgaaaaagatgtcagtaacaaacaggaatcgtctaaaaatcgatcggatttatcagtcagcatttacgaacaattaacactaccattaagagatggccgctcagtatctctcgatactggcgctagcggttcctcaactgtacccgaagtgacacctggtagcgatccttcatcagaaattaatcgtttgtttttaaaggcaaacacagaaagtttacaatcgttaagggccggtgacactttgatagatctgtgtcttagtttaccatccatcaaaaaagccaaaggcaaagttgaagatgctttggccggaaaacctttttgtatacctaccaatcatgcagaagcgacaactcttagaaatacactatcgtcaaccctatctgacattaacctagccatgtcggctataaacctaccggtcttagaaccgttaacctcgagcaaactagacaaattgtgtagcctagctatggcagttctacactgcgcccttagtcaagcctcagcagctgcggttctttctatgggctcagtggtttcacctaagtgctcaaatcaacagtcacaagctggtttgaaagaagacgatttagattcaaacgcagtggctttagtcgaagagactctaaatatgtataattttattggaaatgttattaaaacttctacgagggcaggaggtcatgtgtatcaaaattatttacttgctggggcatgggtgctcatttcgggtctccaaacgcatctcacctccagtacgtctgcggaaaaatcaccacatcttagagaaagggaggaaaaaggtagaagcccttgtaaaagtcgagacggaaatactgccagatctggattacaaaaatttcagcagtcttttggagtactttcggtagctctggcttctagggctcttagtttgttatccgaattgtttgacgatttatatttagaagtgtgtggtggagcagggagcatagtccaggttgaacctgctcccttagcaataatgggccagttcacagcattgcagagaatttctaggatattgaatgcggctcccttaaatcaccttttgttttatctagcaatagtcagttatagaaaagcatgtacacttaaaagattacatccgccagagggcgacacctttagccaatcagattcaacgacatattatgaagatatgatcatgtgctccgacgatagttcaacggatgaagacgatgatagtgagcccatcttaggacaatggtttgaagaaacccttgcgcccccagaaacaaccgagtccaaatcaccaacttctgaaaatggagaaactaaaactgtccaaaacgaacgatctcgatcgatggtcccggaaaaaggagaagctcacggatttatcgctctttcaactagtgtttttgagttcttaaataaacactttctgtgtacgaaaagtacttttatatcgaggtacgtcaaaaatggcttaacggaacagcaaatgattattttggctgcgatcattagagacttggacagggagacagcgagaactgaaataggaacaatttcagtgtatttcggccaagcactaggtcagctttattgcgaattctccggagcactaactagattcgcacacaacttagtaacaaacggaaatttgagtaatttacaagcttgccttttaaatcatctaggagtatctccctggaataccgatgtccctcacgcgtggcccttacaagtatatccaaggacattggctgtcttagctcaggttttgcttttgagaccacagaacgagaaagaggcatctgtaattagtatatggcataggttggtgaatacactcatagaaaatgttcttaacaatcctcattctgtcgttgaatcagaaaatgaagatttaaatgtggaacatgcccaagtgctcctctatttatttcattcattgaacttgatgcagaagaaatcagtcgtgttacttatggctggtggtgttttaagatgttccgagatagcaagaggtccacttaaagattcacagttgctacacttatctagagtattgctattattcgattatattatgaagcacctatacgatccacctacgtcgttgttagaacagattcaatggaacctcttctacttgacaaacctgaattccgacaaagaaaaagaaaatacaatgacccgtatgtacaccgcttggcaggacatagaagacaactacaggaaaatatcggcagttgatgaattcgccatgaaacctcggttctacgttttgacaaatttggaagtgaacaatcaagatgctccgaaactggacggtttggcgtgtaattttatcttgggaaccccagataaactacgatatcctttgttgttggatgctctaattgaaattttgaacgtaacacacatcacttcaggtgctaacgcgtcgaaaatgagtttcctgggactttgtgctacacaatactgtttcactatttgctggaggctattacagctactcccgccatcagcgtcatatatggaacgcttggcgacaggcgaaaatttgacggctggccccttattacttcattctctagtctgggggcctagagcgtcccacaagaatttcagtagatggctgaaggactgtctagttaagcaagggatgtacacgcaacacacagacaaattattaaaggaagtgtccgaagcagttaacaatattaaatacaatataacgaatgctaaaaattgtattatgtcgcttactcctgatgtcaaaaaaggaatggtaaccaaagaaaaccttccaccattatggcatttatttttactcgacgctcttatgacaaacgtacaagtggctttagaagagcccgaagggagcactgaaagtacttcaatcactgtatctaacggaacctacgtccaggatttattaccccacgttttaaggttaactcaagcaatactgcactgtacaagatggtccttactacatactattgctgaccaaaatccgtcgtgtgaaaaattctcattgcagaactttgaaggactacaagatgtccttgcaatagcttctacaaagaatacactaacgatgtcgttatcttctgagctaaccactcttttgccttcatgtgtaagctctgcccagttgcagaattataagacaattttagaagatgtttcattgagtgcttatcaaaacgacataatcccatcagaaagcgccattttaaaagtagtagacgcacatgtagctactctttccatgggcagcccatacagcatcaacttgtcacttcgacgtttattacaatgcctagtcaaatttatttgtgatcatgcccctaaaacagaaaatacagacacgaagaacaaagcgattgaactactagtttcaatcactttagatctaaggaccgaatttttgaatgacactgtgactaaaacgttagacaaaatgattggcgataccgaaatagacgaacatcaaaaacgagtctacctgagggttttagatcatacttataaactcataataaattacacgtcaggtaactcagagacgtatagtgctaatattgatgaaaaaatacttcaccactgtttgaaattctacgaaaaaatcatcgagaaatcttcaggcagacaagctttagaaatcttctttactggagatagggatttggtgaaagtgctgatgtctgtatctagtccgcaaatgtcgcaacattatggtaccagagtactgcatttcttcaataaactgttccaagcagccgagaagagctctacagatccaagcctgaactacttatgttcaagtatgagtaaactggcaaacgtagatagcgaaaagctgcaaacctggttgcgtcaaatcatcatcggtacaagtagtattgaacccgtcgtgacaactacagttaccatcaataaagaagaatctcctgcgacatctaccaacggaaaatggactataaccacggttgaaagtaaagaggctaattctccaacatctaacgacgatcaaaagtccttggtgcaagagaacagtcagctgttgcaagctttaactagttttattgttaaacaaaacagtaatgtttccgaagaagtttcgataacaatattgaaggcgctgatccaacttggaaaacatctgttatcgcctactctggaaggtactggttttactgatttaatggtggatatgatcatgttagcagatgctggttcaggaaagggacacagttatttattccctgctacagcagaatggatagaactgtgcaacaaacgcatctcagaaaaagatgttatagataaattaactagtaatcctgattccttgaagaaaaatgctatgctggaagcctcttctagtattctagactacgttagcgatgttatatcaactattattgcccagcatcctcaaacgataagacctcttagtcctccttgggaaagtgagtctcctttagagttggaatctgagtggcaagacttcgcgaacgatgacgatgatagcggtgaagatagcgacgaggattctttatgcaacaaactttgcaccttcaccgtaacccaaaaagaattcatgaatcagcattggtatcactgtcacacttgcaaaatgttagatggcgttggtgtatgctctatctgtgccagagtttgtcacaaagggcacgatttgagttacgccaagtatggtaactttttctgtgattgtggcgccaaagaggatggaagttgtcaagcgttggtaaagagaagtccccaaaccaacgaaaccaataatgcaacaactggaaacaactctgaacatatgttaaccagttctttaagaagaaagacttcaagtcccatcccagctgacaagattatttataaggagcgaaaaaattcgaacactgtcaaacagttagatggttcaaaagaattcatcatcaactacttaggatcaagtttggtggcaggatctcttttagaattcctacaatctttaatcccagctattgaagaaaactgtcgtagaaattcacttgtaggatgccacttacgcggtattaaggccttggatcaactatactcaaacgaaaagaaatatgtacatactgatcaacttatggtaccaactttaggttctcaagaaggagcttttgaaaatgttagaatgagttatgctggtgaacaaggacagaccataagacagttgctttcggcgcatatagtacgaaggattgcgatgtgttgtatgacgtctacccaaggtcgtagacagcacttagcagtatcacatgaaaagggcaaaataaccgtattacaactgtcagctttacttaaacaagctgattcgtctactagaaagttgacattaacaagactatctacagcaccaataccttttactgtactatcgctatcaagtaatctttgtaacgaagactttttggcagtctgtggattgaaggattgccatgtactcacattcacctctgggggatcagtttgtgatcatttagtcttgcatccccaattagaaactggaaatttcatcataaaagctatatggctgcctggttctcaaaccaaattagctctcgtaacagcagactttgtcaaaatctacgacttagccacggatgcattaagtcctcagtactactttttggtaccgagtggaaagatacgggattgtacgttcatgtacgatgaaggcacttatcacattttattaatgtcttcaccgggacacatatacaccgaaattttaaatgatgattcctctacgaagtatggttcattttatgtgacgaataccttagaagtttttcatttagaagcagcggatgtcattgggcaagtagccggaggtggagtatccatctattactcacatactcttggtctcctattctatagctacgcccaaggaaaaagtttcatatctcccatcaatcccaaaagcaacagtctaccgttagtatttgccataaacctaccgcaaaccaataacaccacttcaaaaagcaatggttcgaaaaattctgccaaccaaccgttatgccaatggaccgagatcccaaaccatcccggtttgatttgttgcgccatgcaatcgaataacaatcctgttattttgatgcttaagccagacactattttgatacaggagattagagtcttaccagccaaaagtaagattatggatatggttgccattagacacagttccggaaatgagttgagaacaactttgattctgctgtgcgaagatggtagcttaaaaatgtatatggctaatatggatcaaacaggtttttggatgtcgtcaagcattcaagctaacattaccaactcgtccgtaaaaccgaaaaagaagaaaataataaaatcggggaagactacaaattccgtaaacttcccagtggacttctttgaacattgcacaattttgaccgagattgaactgggcggtaatgacgttttgcaaatttataaccaggcacaactgaaaaatcgactgaacactactggtttatacatagcttgtaataaaccactaggtttttctctcgatgtaactaataatgatccgaacattgttatggtaggactgagagtattagttggaagtcaagatgtcataaggatcccatcttttgtagagatatttggacgtacaattcctataacagcaactcgcagccgctggtatgacattgcattctcaagagaagaagctcttcaatcagacaagaaagtcacaattctatttggtccttctcaagatcctgaaactgttactatggtcgactgtgtaaaaatttatggaaaaactaaggattcatttggatggcctgaagaaagtgacgaaaatgtagctgctggtggtacgggaagttcccaacaggctgcttccaattcagatagtgatcagagttcaggaaataaaactcaattaacgaaacttgaaaagcttgtggttggcatacttgaatcactcgatggcagcttctctctgcattcaactgaagacaaactggctaccttcaagacaccaacacttaaagttgcaacgtccttgttgacccttcccacccagccgtcagtacaaatccattctaaggctcttttatcatctcttcactctacaaggctactgtatcataattacaaagaccaagcgttacttcaacatgttttgacaactttgacggaaatgacaagtaccaacattaaagatttagatgccgagagctattatagactggttttgattgtaagaggaatcgctgttgctagaccacagaatttggtgaaatttgctgatagccatacttcgatacaagatgttgtcctggaagatcctctggaaaatattataagagaaaagcaaggttcaacgtccaaagaagtcaaaccatttgaacgtaaacaacatagtcagcatcttcttcttcagctaatggaggttctttggctattgcactctctgaatcctgaaattccttcattgtccctagtagtttcacaaggactcaagcacaccgaacaaattgttcatgcacttgttgaaatagtgcacgcctttaatagctgtgatacatacagcaatgtcactatagcagtgtatcttcaactgttattgtgcaatgatcctctgattgcatttagtgctaaacaagctcttagcatagtgcttaaaccaaagacgaagagaagaaaggttttcatacctagtcctcctcattgcgtttcaccgcctcttcagaagaccacagatgataggtctaagactcctcccgctatacaacaatcggttagtcatgaagaagagatgcaagcaagacacccaaatcaatatgatgtggacgccattgaagctattggattactagaacagcctggtcaacagcaagacaaccacaatgttaatgctttggaagctttacttggtggtggcgtaggctttcctccattgctggatattccaccagatgctgatgacgaagctatggtagaattggcaattgcattaagcctacaggatcatgaaattggaggtgaacaaaatcagaccctgcaaagtcttcaagttcaattaggtcaagatgtgcttggcgcccaccaaggccaaaatgcgcaagcgcaagaatctgctaattttagcgacacaacagcttcggcagctggatcagatgatgaaggttcaacagctgcaactgatggttcaactttgaggacttcacctgcagaacaagctgggtctgaaagtggcggtagtggagttgaaagtattactggagaacacaatgtttctggaaggtcttccgcatatggagataatatgcaagaagcaatcaatctagtttctagatcagataccagttcgattgctaacacggttgccggtatggttgaggctgatgcccagcacgaagaagttgaactggaaactgaaagtagcagtagattacacgttctcaggctgcaactcctggagaaactggtggagtatcttccgaaattgaaaaacgttgatggagtcagagtaatacccttcttacaagtggtactccagttaactgcagatatcgatggccattctgagcgagaccgagtatgtttaaattcacttttaacaacaataattagtgaattacaactaacaaatgataattttgctgacgtttgcacacgaaccacccaacgcgaagttcagttgatacttttgcgattactcagtgtattaatgcaaagatgtaaaacatcatcaacgtcaacatctagcaaaaccccaataccagacagcactacctttgtttctcgcaccacagcaacagctcttcacaaagctgacattatcaactactgcaataaactccttcaagctttgttgagctactggcgaaactctacaaatgaggatgattcggtcagcatcacaggaaatcttcttaaagaacgattgcctcatccgccacctgatatgacaccatttttccagaggcagtttgttaaagacaatcaagacgtattccatacatatccacaacttttgacagaaatagctttgaggttgccttaccaagtgcacaggcattcggatgtttcagagcctatcagtgccgcgttccatgtgtcatggtacaagcatctctgtgattatatgatgacaccacagacaccttttgtaagaagacaagtacgtaaattactcatgttcatttgtggaaataaggaaacatataggcaattgagagacttacacggattaagaaaccatatgaagagagtaatggaatgctgtaccaaggctggataccaacctgctactgacattcagcatgctttgagcctgccgtatgatgccctggttgaattaattgaacatttgaaatattgtgttgaggtcgctcaaagtcgcaccggtaactggcaacgcttctgcataaaagaagaagacgtaatccaattcttgatacgtatcagttttcttttggatgatggtgttgcacctaccgttcttcagcttcttcaaagcgcaatagtagttaactcaccggcaaagaagcccgatccatcgaaaacagcctccaggaaagatcgagaaaagtctgacgattctagtaccgaagccgtgttcgaagaatctaactctgtaattttagtagaacagatcaccaagcatatatctaaagaagtgtttgcgcgttttgtaaagacatttatgctagaaactaatataacctctgtaagatggcaggcgcatgcgttgacgctagccatttataaaaactgtaaacctaaagatcaagaagccatactagaccttttgtggcagttatggccattgctaccggcttatgggagaaaagctgcccagttcgtcgatttgctcggttacttttcactgagatatacggagaaaaccgaaggtgttgaagctattcccgaatatgtcgaacgagcattcagtgttcttaaagcacagaacgaaatgttagcacatcacccaaatgcaaacctatatgctcacatgggccaatttgtagatctggatggatattacttggaatcagaaccttgccttgtttgtaacaacccagaagtttcgtttactgtcattaaattgagttcaatcaagattgattcaaagtttacaacaactacacaaatcgtaaagctactgtccagtcacacaattagtaaaatcactataagaatagcagatttaaaacgaacgaagatggttagaacagtcaatatttactataacaatagatctgtacaagcagtagttgagcttaaaaataaacctgcactatggcataaagcaaagaaggttactttacaatctggtcaaactgaagttaaaatcgagtttcctctaccaattgtagcctgcaatttaatggtggagtacgcagatttttatgaaaacattcaggcttcatccgaaacgttacagtgtccgagatgtagtgcctcggtaccggctaacccaggagtatgcgccaactgtggtgaaaatgttttccaatgtcacaaatgtcgtgctatcaactacgacgaaaaggatcctttcctgtgccatgcatgtggattctgcaaatatgctaagttcgactttagcttactggcgaaaccttgttgcgctgtggagcctatagaaagcgacgaagatcgcaaaaagaccgtttctagtataaattcttttttggaaaaagccgatagagtttacaaacaactcatcgcgaataaacctactttggaatcgctggttgttaagattacagagcacagacccgataaaaaagaagatgctgtttcgacttcgtcggcaccgactgcaggtggcgctgcagcagcagctgctggtgctggagcccagttgaaagtgaacaaaacaatacaaatgctggctcaacaatactgtaatgagtgcaagacttcgtttgaggagctcagcaaaattatacagaaggtgttggtgtcgcggaaagaattggtggcttatgacaggaaacacagagatatggaattgccgaaatctacaccggtccttagcgaaaatctggtcaattttccttgcgttaacaatcgttgttacggttgttccaccgctgccacagaacactgcttgactttgctaagagcattggcacacaatcctacaaccagagaagttctatgttcacaaggactcatccaagaactagtatggaacaatctaagaaatggaagcattcacagtcaagaggaggtgagacaattactttgcgttctgactaaggataacaggactgccacggaagaactctgcaaccttttaatggagaggataagtttgagtttgaatggccacatcagttctgcagacttgggtacgagtgttaggcatgaaattgctctcttggcagcgatggttcaaaaagaagatgactgctgggagctgaaactcaggtgtatgatgaatctgttcctgaaagcatgtgaaggatcgagaagtcccttggtgatggaatctatcattttaccatgtttaaaaatactgcaaagtttaatgaaaattccggaacctggatctaagaaaactaaggaaaaaccagctccttccttgcaactaagcgtgcaacttgaatctccgtatggtgcgatggttgacctcaataaatttttggataaagacgatgctcatacttttaatgggtggaaatcaagattccctaaggcacaagaggcctctgcctcggccaaactcagcaaagaggagaacagaaaatactatttggctgaaaaatactgccgcaaatggagaagacacattaagaacctatatatccgcgacggactcaatttcgacgatacctcatggctcaaagccgtcattttcaacccaagttctcgattagcccgacaagtcgcatgtaacatcatagaaatcatgtgcagcagtttcgaacgcaagcgcgacatgctcgatctgctaactcatttcttagcagagttaaatactgcaggcgaaagtgctgccgagttccttgccatttaccaagaacttatcgcggagacgccttggaaacagtatttaactgttaacggcgtacttacagtgctcgcgcaccttatcaccatcgagatagagcaacttcacaggctcgaagagacaactttgacgtcagatcttgcacaaggatatgcattgaatcagattacggagttgctgtcatatttcttagatgacgtggctattagaagacaatacaaaagcagacttgttggagcggtgttgaatggatacctgtctttaaggaggcttgttgtacagagaactaggttgatagatgatacacaggaaaaattattggaactactggaagaaatgactacaggtacggaagaggaaaccaaagcttttatgtcagtgtgcattcaaacagtagaacgatacagtcttcaagacattttaactccggtgttcatctttgaacgtctttgttccattatatatcccgaggagaatgatgtaggagagttcttcttgactctggaaaaagatcctcaacaggaagatttccttcaaggccgaatgttaggcaatccttattgcagtctggaagctggattggggcctttgatgagggatgtcaagaacaagatctgtcaagattgcgaattggtggctcttcttgaggacgacaatggtatggagctcttggtcaacaacaaaatcatgagtttagatttacaagtgaaagatgtatataaaaagatctggttggcagaaggaagtgaccatgaaccgatgaggattgtgtacagaatgagggggctccttggtgatgctaccgaagaatttgtagaaagtcttagtaataaatcccaaagtgatgtagataatgaagaggtctataaaatggccaatgagttagccgattgtggaggacttcaggttatggtaactagattgggagcgataccgagcgtcaccagagctagaccgttgttacaagtgttattaaaattatttaggttatgtgtgaaagttaatcgttgtcaagaggttttaataaagccggagttgaagtccatggaagtatttttacgcacgttgcaactttgtttagatagcgataaagattctagtcaaactggcgttaccgaacaactattagatattatggaaacgatcttgtcgaaagcaacgagtgaatccgaagaaaacttcaccgagttctcacaaactctaggtagtgccgaatacgtcaaatctttactgtcatgtactaatcagcaggtagtgaagaacagttccgttctagtccatttaaccagggtattagccgctttggtttacggcaacaaagagaaaatgaagattttacttgaccatttcagttccgtcctggatttcaacaaatatgacatggaacataactcagacgatcaacaaaaactcgagatgttctgtgttttaaccaacagcatcgagaagaatgccatcggcagcacgttaaaagattacataatcgctttggaaatagtcaaaaatgccttagaatacataactatgcacgcaccttgtgtcaaaccgactttattaagggtagacagcgacgagttgaaagatttcatatccaaaccggctttgaagtacatcttgagatttttaactggattagctcatagtcacgaaaaaacgcaactagcaatagctgctgcggaaactattccgatcattcatcgtctggaacaggtgtcttcagatgaacacgtcggatccctagctgaaaacttgttagaagcactctgcacgaatccggatgtcgcaaagcagattgacgccgtcagagagtttacaagatctgagaagaaacgtctcgccatggcaatgagggaaaagcaacttggtcagttgggaatgagaaccaacgataaaggccaagtcactgcaaagtctaatatactccaacaaattgaagaattgggcgaggaatccggtttggtgtgttgcatatgtcgtgaaggatataaatatcaaccaaccaaagttttggggctgtacacgtttacaaaaagatgtaatgttgaagaattcgaaggcaaaccaagaaaaactgttggatacactactgtcagccacttcaacatcgttcatatcgattgtcatatgagtgcagtgaggttggcacgggctcgtgacgaatgggaatctgcggcccttcaaaacgccaacaccaaatgcaacggactcttgccgctatggggtccacaagtacccgaatcatcatttgccagttgtcttgccagacacaacacatacttgcaggaaagcacgaatcacagagatataggacacaattcaactattcacgatttgaagcttttgctgttgaggtttgcacaagagaaatcttttcatgaagatacgggaggcggtggaccacaaagtaatatgcatttaataccatatctgatacacgttgctttatatgtgataaatactacaagagtgaataaaagggaagaagccaaccttatgtcgtacatcgaagctactaatgcagaaaaatggatagaaacagcgtatgatgctgaaggtcctctatattggataacgatgtccattttacttcactccagacaacagtggcaagcacatcggctttctcacttcaaacggttaatggttttggcacaagtgcgacattgtcaaccgtccggacctgtcaaaactgtatcagacaaatcagtaaaagattataatatctataaaccgtacttgttgttctttgggcttatcgatggaatctataaccatttcttcaagaatgtgggaggtccagacgaacaatggtcaaccaacttagcagactacattcgccacaatgatgaagctttgatgaaatcttcagaaaagctcttggctgattatacagatgaatttttaccttgtacttccttttcagaattctgtgatgtggcaggtttactcgacattataaccacgccggataggtatttaagtgacctgctgaatggattaccttaatgtgtataaaatgtttccgaattttaaaatgtaaacaaaggctgtacactgtttttactaatcgcttgctgctaggttgtaatctaaataaatgtagtatatatttgcttgttgttggagttttagaaaaactaaattattgtaattacgattgattaattattatttgaattaaa

SEQ ID NO: 114 - DNA, 852 bp, Diabrotica virgifera
aagaaacaaattgaaattgaaaataaacaaaaataaaaaataaccagtccaaaattaaatggcaaatattacaatagtaaaaaacaaaatatgaatgtgctccagtctcaaaacgttgccagagagatgatgttttacgtaagaccggtctgactgttggaaaggtagatttatattatggaagaggcgtccgaaatgatggatctcttgtacccccgattagacaaactgcaagtatttttaaacagcccgtaactgtctataagctacaagagagtaaagtaaaaaatgattataaaaacgggaatcaagagaaaccaaagcaactaatttgggagaaaagattggaaggtttaagggcttgtgatatggatggctttgagttcgaagctatggaactgccaaaaggtttaaaaccagtgggacctaatgtaactgaagacaccattatccagagtgttgctacagcactccatgtttcttctcaaccagtgacaggccagacaagtacaaaaacactacttgaaaaaaatccaggagtatttctcgatcccaaacaaccattagtacacgctgtaaatatatcagaggatgatatcaaacgtcaagaggagagagttgcattagcgaggaagaagttacaagaggctctaaagggcaacctataagatataagtattttgagtaatgttttatatgtacatgtcataattattagattgtaagttacaaattaaatcgttccaatcctgtaaattataaccaattggtaaataaaataagtttcttcagtcatatacaaaaattatactttttaataataagaatgtcaaagactttatatgtgtgaac

SEQ ID NO: 115 - DNA, 1099 bp, Diabrotica virgifera
ctaacaaatttatacgtatagaaatataccctgtgatgagagatgttagtttagacaaatagaacaacatagggataaaactcttctcgctccggggtaacggcagagctttcacaacccgaaatgttacctcggttaaaataataataatggcaccctttaaaattgttatggttcgtcatggagaatcagaatggaatgaaaagaatctattttgtggctggtttgatgcaaatttaagtgaaaaaggtaaacaagaagccattaatgccggaaaagcactaaaaaatgcaggatacaaatttgacattgcatatacatctgtccttacaagagctcagaacacacttaattcaataatcaaagaaattggccaagagaatttggaaactataaaaacttggagactcaatgaaagacattatggtggcctcactggcttaaataaagcagaaacagcagcaaaatatggagatgagcaggtagctatttggcggcgcagttttgacattccacctccaccaatggaacctgaccatgcttattatgataccattgtaaaagatgcccgatatgctgatggtcctgcaccagatcagtttcctaaatttgaatccttaaagctaacaattgagcgtactttacccttctggaatgaaactgttgttccacaaattaaggctggaaaacagatcttaattgcagcacatggtaacagtttgagaggaattgtaaagcatctagaccagcttactgatgaccaaattatgcagttgaatttgccaacaggaattccatttgtctacacattagatgaaaatttgaaaccaataaagagtttagaattcctaggagatccagaaactgtgaaaaaggctatggaagctgtagctgcccaaggaaaagccaaataagcattatttattatttattgttttaatttatatcaaaatcatttattgttagatatttgatgtgtaatgaataaatggttaggctgaattgtaaaactcagcagaaatgttatgtgcaagacattaaagcatattcttagataagaaaaacatgtctgaggatgataaaatataaaaaaaaaaaa

SEQ ID NO: 116 - DNA, 523 bp, Diabrotica virgifera
caactagcgtgttaagactctcttggtctcctgatggtcagtatttagtgtcagcccatgctatgaatggtggaggacctacagcgcaaatcgtagaaagagaggggtggaaacatgataaagattttgttggacacaggaaagctgtcacttgtgtgaggttcaactccaacattctccaaaaacaagaaaagaacaactctaaacccactcaatattgttgttgtgccattggatcaagggacagatctatcagtgtttggttaacttcattaaaaagacctcgtgtggtcataaaagacttatttaataatagtgtattagatatgtcatggagtagcaatggactctatttgatggcatgctcttgggatggttctgtagcatgtattgtgtttggacatgcagaaattggaacacccttgactatggatgagaagaatgaattatatgaaaaaaatgtaccacaaatcatttcaaaaaaagttggaatcgtaattttggtacgtcccaaatcatcgaa

SEQ ID NO: 117 - DNA, 531 bp, Diabrotica virgifera
attcccaagaaaatagaacgaaatctggtgaaacatggataaggataatcacccaaggtcaggaagtgactattgactgcgatgaaaagactttagcagaaatgggatttaaagataaccagatcgtttatatatcgataggcatgtcgaggaatatgaagaaacgggagtttatggatgcaccatctttacacccgcctcctcctcgggaatgtttaccaacattacttcttctacagccaaattactttgagcagctattttccttaatgcacacacttagttcaatgaaaattcaaattaaaggagggtgccaattaccacatacaagagcccaagttctcagcagaagagtatgggatattcttagcttattaccaaccagtcccaaacttcttcgtggtttcaaatacttggatatccctcttccagaattgttagatccttcaagtgctcaaaaattaatgtattctttgtatattgtcgaatctttaagcgccaaaatgtaccgaggaaagtattcagatgagg

SEQ ID NO: 118 - DNA, 4324 bp, Diabrotica virgifera
gtagaaaaggcaactgtcacaatcgatatgagaagcgctttcaaaaagttcgtagacactagattattgcatatgaaggttttaccatcgcctactagaacagctttacccaaatgcgaactgtgggatccagaaactatgaccagtgcactcgatgtcgtaattagagcagcaaaacactcgtatcccgagccagtaatgttagtgagaggttttagccagccagtcaaagttagttttgtgtatagttgtaaccgattctatgttcagttagtaaaaaaagaacaggaactaacaactcttatggaagagcttcaaagtttatgtctagaaagtgcttttatggacttttcttccgttaaaccaggaattccatgttgtgcccaatacagcgaagaccagatgtggtatagatcgcaagttacagaagtacaaggaaatgtagtcacagttcgctacatagactacggaaacgaggaatcagtggctatagaccagctgaaaaacatcgaaggcgaaattctaactgttcttaaacctcaagccattgaatgttgtctgaatggataccaaaagatggaacctgatctccaaagggatggtttacttgaggaactgctattggaaaacacatttacaatgaaagttgtggatatgtgcgacaaaaaggcattggttgacttatttgatgaaaatgaatacaacgtttcttccttgttgctggtcaaattatctgaagctagttcacaggtcagtcccgtattggtacaagcaggcaacaaactagaacatagaaaatcatatacacaacaaagggaacagaatttcaagggggacagaagcccaaacaccggacgtgaacaaaaaccttgggaaaaacctggagacaggaacgaaaagtcttggagacaagatagtcgagataatagagataatcgaaatttcgaaaaaaatacgaacgacaacgatagatcttggcgtcaaaataacaaagattacagtgtaaatagtcgactggacaaatacaaacaaaacgataccgggaacagtaacgactataacagtaacagtaacgatgccaattggaatgacaatcagaccagcgagagttggaacgacggcgccgaaaataatcccaccgaagaaccaaaagacgaatgggtaactggttcgaacgataacaatgaaggtggatccagttggagaaacaacgataacagaggcgatagaaagaacagaggggggtctcatagtgacagaggtggtagagatggtttcaagagagacagagatggaggtggttataacaacgatagaggcggtcgtggagattataacagcgataggggggatcgtggaggatttaacagtgatagaggcgaacgtggaggatttaagagtgatagaggcgatcgtggagattttaacagcgatagaggcgatcgaggatttaaaagcgatagaggcgatcgaggatttaacagtgataggagttataacaacgataggggcgacagagacgattttaacagcgataggggagatcgtggaggatttagaaatgatagaggaggaagaggtggaggacgtggaggtttcaacgatagaggaagccaaagagatggaggatataaaagagattataataaaaaggatggatctgaggatggttctgagaaaggcttccaaagaggaaacagatcgaattcccgctatgatcgaggaggtagaccccctagagacttcgacaaagccaggaatttcgatgacaacaatgctggtagagattcatggaactccacaccgaaagcaccggccatagattctgttcccgtctctaccacattccagtcatacgaagtcgttggtactgaagcgaagattacagtcagttggttccataatcctgaactattccattgccagttagtagactatcaagaaacattcaagaccatgatggaagaaatccacgacttttacaaagacagaaaacccgaattggtagtttgcggtgcacctgtagttgctctgtttcccgaagacaatgttctgtatcgcgcaagagtattggaagttgtaggtatcgattacaaagtatatttcgtcgattttggcaacgtatccatagtttccaagacgtttcctatcgataagaagtttatgaaccttcctgctcaagctatagcatgttccttgaacggcgtaagtcccgttggtgaagattgggcagatccagatacatatagcggatattttgataaggacgcttttgtttgcaattttattaaaaccgttgatgaaaaagcttatgtaaatataacctacgaatcccaaagtatcgctgacctattagtcagagacggcttggccctgtcggccgcatctggtccgtcggacggagatgtagatatcaacgtgctactcggccagcaatttagagctactatcatcagcgtaaatgatctgaacgacttcatcgtgggactggattgtggtaaaatcatcacctgcaccatgcataacttggaaactgcgactgaaacttttaaagacgaccttaagggtctcttgcaacaggctgtgattatatatgtcgataatgtcttagaagataataagttagaaattaccctttatgatactgaaggaaataaacacgttatagttaaccctgatgaaggtgcatacgacactttagatcttccttgtccaacgctgatattacgttcaaacataaccggttacgtacctttcggcagcgaatcatcagtttttatccaaccaaacgaatacctcgaaaccataaattcccttctcgatctgttgtttgaaacttacgacagtaaaccaaacgagaacacaataattcccgaaactgattccatatatgcggtacatagtgaagatggaaactggtatcgaggcaaagtgactgatttcgatgatgaactggctacggtttcgtttatagattatggcaactctgagcaagtggcgttttctgcgttaagagagcttgaaaaagcatttttggacattcctattttgtgcgttgaggttaatattggcgttgacggtaccccgttcgttgacagtgaagtaacagccaaagtcttttatggtgaaactggctgggaaggtactctgcagcccccggagtcttctgctccagaggccgcttcagtaccagaaccgcaggaaaattatgtcgaaagtacacaggaaactgttgcctatactgaagagataccacaagagaatatttcgaatgatcaaccattacatggtcaaatagttgaaacaggatcatctgctgaagcagcatcagctgttgatgaaccattaaaaggaactgttgtttatatgagtcatattgactccccaagcgatttttacctgcagtttgccaaaaacaaggaagatatcgaaatccttcaaaatgaattacaaactatggtagaagaaatggaggttctcgaaaatccagcacatggtgctttgtgcgctgctccctattccgtggaccaatagtggtaccgagcagaagtgttggatgctgatgaggatattaccacggtgcgattcgttgattttggtaacactgatgtcatcgataataacacaacaaaagtaaaaactcttcctccaaagcttctatcactagcgatctacgcaacgagatgtgcccttaaagttgagcccttgggagaggaatgggacgctttagcaatgacagcttttgagaatcttaccaatatcgaccttaatttaacggccgagattataaatcaggatgaaaaatgcacgtatgtggaactgtacagtgatggtacggatgttcgggcagctttggtgaatgacaacctggttaaaccaattgcagaaacgaccgaaacaagacagactggtttcgtaagccacttaaactcaccgtccgaattctggatccaactggagagttgcatagacgaactcgaatggattgccgaacagctcagctcagctgagacattccccgacgtaacggatttgactcccggcactttatgtgcagctcttttcccagacgatcaaatgtggtacagagctagaattctatctgacactgtggcaggtctagaacttattttcatcgattatggcaactcgtgcgtctgcacggatttgaagcagcttccagaagatttggtcatgactgcgccacttgcgatgaagtgtagtctgcagaagaacgacggtattcccacatggacgccagaggccgctgctaagttttcggatatatccgccgaaggccagacgatttttaccgttaaaaaaa

SEQ ID NO: 119 - DNA, 7780 bp, Diabrotica virgifera
aaaaaataaaagtgtcgggcgataaaaagtcattttatgtactttttaagacgtcctttcctctagaaacccacaaagttggtcaaattatgagtatagagttgaacctacaatgttaatgtaaaaacgaatcaaaatatgactattgcaactagggcacaaggattgacaggagatagtgttgaacctcaaggatcttctcctggaccatctgagaacaacgtcgtcgaggaaatccaagatgaaaacttcgaaccggagttccccaaagataaattagcgtcactggatgaaaaaatatcgagcttgcgatgggtggtgccagtcctggccgaccaggagctagaatgtctactgaaagtctccatagacttggcccgaaaaaatctcgatacaagatccgaatcttgccagaggttcttcagggagggattgacggtgtctttcacgaagatattgacggacgatgcagtgtccagttggaaaccgaatattcacgcctgcatttatcaaaactgcctgaaactcatagagctgtgcgtggtgaagctgcctcaagactggtaccctctattggatttactcgccatggttcttaatccgaataacaagttccacagcttcaattcttctagacagagcgaaacggccggtccgaattgtaatttatcggaagaggagctcttcgctagaccatcgagcgacttgaggaatcccagagggtggttggtggaccttatcaacaaattcggagagttgggcggtttccaagttttattagatagattccaatcggggaaaaatttaagtatttctatagtgttcgctttactgaggccttttgggttttgctttgaatttttgacggttcacagtatcaacaagtatatattgcctatattagaaatgattcctggtatattagataaattatcggacgaagaattgaagaaggaagcgaaaaatgaacaaaaaagcgatatcgtctcggctattataaaatcgtctaagaatttggcatctagagtacccaatcaagaagaacttattagaactttagaaggatttagattgactatgatattaagacagttgcaaatctccagctttaacggaaagatgaacgctttaaatgaaatcaataaagttatttcgagcgttatttattacccgaatcgacaccacggaatggaagaggaggaatatctcacgcctgaacgtatggccaagtggattaatgaaaataaagtattagaaatagtgttaagggattcgctacaccagccgcagtacgtagagaaactcgagaagatactgaggttcgtcatcaaagagagggcgctaagtttgcacgatttggacgccgtttgggcagctcaagtcggaaaacacgaagccatagttaaaaacgtccacgatttgttggctaaactcgcttgggacttcagcgccgaacaattagaccatttatttgagtgtttccaaaacaactggacttcggcgtcgaagcgacagagagaaagacttttagaactgatacgtcgattggcggaggacgacaaagacggcgtcatggcgcacaaagttttgacgctgttttggaatctggcacacgccgaagatgtcccaaccgaaataatggatcaagctttagctgctcatgttaagatattggattatagttgttcgcaggagcgggacgcccaaaagacagtttggttggataaatgtgtggaagaactgaagaacggagaaatgtgggcgcttccggctctcaagcagatccgtgagatttgcacgttatacgaacagaacacgaacggcagccacactcaacgtacccaccacatttactacagacaagaagtgatagaacgattgcaaaaccagcattctctagttatattagtaaccaacagcctttgtagttatatggatagattaagagaattaatcaaagagaacccggaattgaccagcgagacctacatacccgacggacggtacggccacacgctgcaagtccaggaaagactgaattttcttagattcctcttaaaagacggacaattgtggctatgcgccgaacaagcgaagcaaatatggcagtgtctcgccgagaacgcggttttccagagcgacagagaagcctgtttcaagtggttctctaaattaatgggagacgagcctgatctagatcccggcatcaacaaagacttcttcgaaaacaacatattacagatagatccgatattgctcacagaaagcgggatcagatgcttcgaacgatttttcaaagcggttaacgtgaaggaaggcaaagtgaaatacaaaagaaggtcccttctaacggaagatcccgatctaataggtctcgattatctatggaaagtagttactttgtgcccaaacgatatcgctaccagagcgatcgagcttcttaaagaagtcagtaccaacctcggtcctagattgacccaagcgcagttggtgttccacgaaaactacatcaccgaatgctacgacaggcttcgagctcactacgacacgttaagtatcttgcaaaaatcgaccaacgacaaagaattcgactccgagcaacttcaaaaccgcattaagtcggaagccgtgaaaatatgcagggtactgaaggttctacacgagtacatcagcgaatgcgacaacagcttcgtgggggaacgtaaaattcttccgttgcacagagcttgttacggcaaacacattactctgatcgtgcggttctctagtcccaacaggcaagtcgaagacttggaactgtacacgcattcgaacgatactctagcctctttgagaaaatacattttgaaacgaatcaagcctggtatatattgcaagctcgaattgttcatcaacggcgagcctttggagcccgccgaggacaagaaacttctttcgcagatacccatcagggacaaaatgttaatatcagcaaaaatagttcaaatgaactcgaatatggcgtcgtcccaggacagtagttcggacagttcgacctcttccccccaccacccgtacgacggtccaaacgtcgaagcggagaatctgttaccgggcgttctgatgtcccaacaaccgttctacgcccaattcttctgccagttgatgaacgtaggaagcacgttgccgtttgcgatgttgagagatatggggcacgcgcttcttcagttgatgccttgcaatctgatgacgatggagaaactgaggattttgttttctgcgccgggagagcagaacatttcgatggatagcatgtttttcagcgcctcgccttctgaagtattatacaacttggaagtcctctacactatgttaatgccagccatagacgccatctccgaaaaatcgtacgaattccagtacagcttcatgatatccggagaagcccacctcttcctcgagatgttgacgaagaataacttcatgtcgagcgccgataacgttaccagacgttcggcgtatctagttgtcctgaaaatatgtaaattgatactgacatctgtcgcgcacgtcctggtaagactgagtgaagatcacactcctccagaaaatgaggctttcaacgaaaataccactccaccgggaacctttttgagacaggcattacgaaatgttcctggacactcggatcatttactgcgacaagtttccatgaaactagctcaaggtttagcgcaattgatggtatccgaaacgggaaacaccggccaagctcaagcactgttcagtcaagcgttgaattgggaactgccagacttagccacgacgttggctttggtgcggctggtttgggcagcgagcagcaacaatctcggcgctgtcaacgcctcgttggaaaacttgcactctttatccgaagccagcaacaagaaaaagtcggaactagtcaacgacgacgtgctcctctgcaaagaagctctggaactgctcagtaccgccgtagtgctcaaccccagcagtttgcagcacttgtaccaggacaattggtggccttacttcgttacggacttggtgctagtcaatccgaattgttccataagagtcgcagctgccgaacagatgatcattatatgttcttgcggcgctagcagtcaaatggctttgcacgtcatcatgccgttgctcttttctctcatcaataccatcgtagtcgaacacgccaacacgtcccacgagttttttcaactgttgtgccgtttagtcaatgtagcgtaccttaccggatgtcccatcaacggtgtggagaccctactgtcaaatgaggttgcgtggttacgaaaagccagagacaaacacgaagtactgatagaaggccatctccttctcgccaaagagctccttttgctgatctcctcagaacagaagtgcgaactgggtagtgctgagtccggcagtctgattaaagaattgctcgaagacttcctgtttcccgccagcaagttgatgttgagattacacaaaacgggtcagctgggcgaagacccggccattcctatttgtgatactccccaaactcaggccgcagcattcgatctgttggtatcactgtgcatgaactgtgtacaaaactacaaacagctggttaatatgctcacggagatgttttacaacgatcctgacactgcaatctcggaatgggactaccttccggcagtagggccgcgtccattccaaggtttcgtaggtttgaagaacgccggagctacttgttacatgaactcagtcttgcagcaactctacatggtcgacagtattaaagaaggcattttggcagcagaaggagcagctacggaccctaacgaggatttcaccggtgaagagagactggatatggacgtggattgcactgatgataggaatagtttggacgataataggaaggactacaacgttgggattttgaagcaggtccaggctattttcggccatttggcctgttctcgccttcaatattacgtgcctaggggactgtggagacatttcaaacttcaaggcgagcctgtgaatctgagagagcagcaggatgccgtggagttcttcatgtcgttagtggagagtctggacgaagctttaaaaacattgggacacgagcagatcatgtcgaaaattcttggaggttcctactccgatcagaagatctgcaaaggctgtcctcatcgttattccaaagaagaaccgtttagtgtgattagtgtagatattaggaaccacagtagtttgccggattcgatggagcaatatgtcaaaggtgaattattggaaggcgccgacgcttaccactgtgaaaaatgcgcgaagaaagtagtgactgttaaacgactgtgcgtgaaaaaacttcccccgattctaggtatccaattgaaacgattcgaatacgatttcgaacgagtatgcgcgatcaaattcaacgactacttcgagtttccgcgcgaactcgacatggaaccgtacaccgtgtccggtttggccaaaatcgaaggggaaattatagactgtgatcttcaacctacctccaccgaggtctgtaccaagtatcgtctatctggtatcgtcgtccattctggacaagcttcaggtggacattattattcgtatattagaagtagagatccctcgggagacgtcagatggtacaaattcgatgacggcgacgtgtcggagtgtcgaatgggcgaagacgaggaaatgaaggtgcaatgctttggcggcgattatatgggtgaagttttcgatcccatgttgaagaggactacgtataggagacagaaaaggtggtggaacgcctatatgttgttttataccaggcatgatgttgaggaggagagtgccttgaagatgatgaaccaattgacgatttccggtacgagaaaagaaacacatctcaagatgccgatagccatagaaaacagtataagaaagcaaaatatcaaatttctacaccataggagtcaattttctttggaatatttcacgttcatcagaaaactggcgacgagttcagctcagggcaatactagacttagtcaaccgttgccaaacgatcaattagaacaacagtatctactcagtgttcaactagtcagcaaattcctttttcatactgggtggcatacgaagaagaatctacgaggacctgccatggaatggtgtgacgtcctatgtttgcatctgcgcacctcgcctgtgatacgttcctggttcgcacactgcatgctcttcgagcacatgagccgtttctgcgaatacctgctgagttgtcctagcaacgaagtccgttctgcatttatcaagatcgtggtattgctcgcgcacttctccatcaacgacggaccgtcggcttctccggcggccctcaacagcaccgccactggctctttgagtgatcacatcctgtgggcgttgctcagtctgctgcagagggaggtcagcgagcacgggcggcatttgccgcactattgtacggtgtttcacatgtacgccaatcaaggtattcaagaaaagacgcagctgctgaggatgaacgtgccggcgacctttatgatggtcgctctagacgaaggtcccggaccagccataaaatatcaattcaccgaattaggaaaacttaatcaattagtcgcttgtttaattcgatgctgtgatgtaagcagtaagtgccagaacagtaccaacggtccagttttacccaatccctacaaagatcccaccatacaggaatacatcatgccaatctcctcgcctgccgccgaaatcctattcaacaggaacgtatacgtcaagaaagtgatcgaagatacgaatctgactgaagacgcgatcaaattcttgcagttctgttcgtgggaaaatcctcatttctccagggcggtattatcggagctcctgtggcagatagcctacgcctattgccaagaacttagacaccacatagagatcttattgtcaattttgttaatagaagattcctggcagaatcatagaatacataatgccattaaaggtgttccggaagagcgggaaggtcttctggaaaccatcgtccgtgccaagaatcactaccagaagagggcgtaccagtgcatcaagtgcatggtggcgttgttcagtcgttcgtcggcggctcaagctatgctgttgagacaggccgaagtgaggcgatcgtggacctcagcagtagcttggttacaggacgagctggagaggaagtaccccccaaatgctcagtactcctacaacacgtggtcgccaccggcacaaagcaacgaaagctccaatggatattttcttgaaagatcaaacagtgcccgcaagacgttagagaaggcgctagaactgatgcctgagaccgaaagagaagaggaagtggaagagacgcactcgcaagaggagccgtcgccgccctccgagcagcattcgcagcagcacacgatcgcgcagccgcaaaatgtcgataacaacgcgccgtcagagctgccggatgtaacacagcactgcgaaaaccagcaggacaggtaaaagaaatgacggacgggacggcggttgtcgagcatttcatccacttctataagctttgcacgttatataaaacgggcgataggaatgtgatatgtatgtatatattataaaaaaaaaaaaaaaaaacaggttatattggctgggaagcatttttctcttgagcatgttcctcatatttttttggtttttaatccgcaagtctaaatgtaaataccgaggcaaaaaa

SEQ ID NO: 120 - DNA, 1219 bp, Diabrotica virgifera
  misc_feature (1198)..(1200): n is a, c, g, or t
gtttggtttacatcttagtttttaaaataaaaaaatgtttgaagctcaagaaattcacgcagaacataaagatctcattcacgatgtcgcttatgattattatgggaggagaatggccacctgttcaagtgatcaatttgtgaaggtttgggatcaaacatctgatggaaagtgggtgttaacatcaagttggaaagcacacagtggatctgtatggaaagtaacttgggcccatcctgaatttgggcaagttttagccacttgctcctttgacagaacagcagctgtttgggaagaaatagttggagaattaccaggaccaggcgaaagaggtaccagacattgggtaaggagaacaaatctagtggattcccgcacttcagtaacagatgtcaagtttggaccaaaatctcaaggactccagttagctacttgttcagcagaaggaattataagaatttatgaagctccagacgttatgaatttgagtcagtggacattacagcacgaagtccaatgcaagctgccatgcagttgtttatcatggaatcctagtttgtctaaaatgcacccccaaatgatagcagtgggaagcgacgatccaaatccagcaaatggcggcaaagtgttcatctatgaatacaatgagaacagtagacgatggacaaaattagaaactataagttcagtagtggatcctgtacatgacattgccttctcgccaaatttgggaagaagctatcacattcttgctgtcgctaccaaagatgttaggattattaatttgacacctgtaaacgatgaacagagcattcagagtggagtaactaaattggatgtagaaaccattgcacagtttgaagatcacaacagtttagtatggagagtatgctggaatctaactggtacagttctgtgttcaactggagatgatgggtgtgtcagaatgttcaaaatgatttacattaactcatggaaacctgtagccgtattgaaaggggactcctctcaatcctcgtacgatcaaagaaccaccagctcaacgaacaacggaagtaccatcataccattttaccaaactgctagatatatcaagttaggatctatagcacagacgagggaggcaccgtggcactgaatttattataacttatttatattgttaactgatgattttaatataataaacattttaagnnntaaaaaaaaaaaaaaaaaa

SEQ ID NO: 121 - DNA, 680 bp, Diabrotica virgifera
  misc_feature (21)..(21): n is a, c, g, or t
  misc_feature (506)..(506): n is a, c, g, or t
  misc_feature (585)..(585): n is a, c, g, or t
tcaaaaggtgctaatgtcatnttcaaatgagtgaaaagagcgtgggaaccatgcagggggtttcgggcgaacgccggttgcgccaactggaaatgttgtttcttggcgggcctgtgctagccaaagaacaaagttttagtatcgaaaccctcatagatatattacttgttctctacgatgaatgttgcaattcgagtttaaggaaagaaaaaacagtttcagattttatagaacaagttaagcctgtagccagcacagtaaaatctttaagattgactcgtgaagatttcgagataatcaaggtgataggtagaggagcttttggcgaagtgtgcgtagtcaaatttaagggcaccgaaaaggttttcgccatgaaaattctcaataaatgggaaatgctcaaaagggcagaaacggcgtgttttaaagaagaacgcgatgttttagtctatggtgatagaagatggataacgcatcttcattatgcgtttcaggatgtatctaanttatatttagtgatggattatcactgtggtggtgatttgttaactttattaagcaaattcgaagatcgtcttccagaanaaatggctcggttctatatagttgaaatggtcttagccattgattcaatacataatcttaaatatgtacacagagatatcaaacctgacaatgtt

SEQ ID NO: 122 - DNA, 5553 bp, Diabrotica virgifera
tgaagagtgcacagtggtgtatggagaaaactgctgtgggtacgcggattgaatgacttttatgtcccttttctgtaaatgagtgttttttttgtataaagtaacctaagggaactaaccgttgttgttgactaaatcgtatttgtgatataactcgaccacatgaggcgtatcctcctcaagcatcagtgattaagttttacctatcgaattattggtggatcaagacccggagaaccatttgtagcggttggctattattttgggttaatcattatcacgatctcataatatgacggatacgagtcaggcggagcaaccgccccaaacgaacggcatttccgacttggaagacgatgacagggccaaaatgagaccagtagacatagacgccgatgtgagagaaatggaacgaaggaaacgagtagagatgataatgaacagtaaactattcaaagaagaactggaaaggatcttagactcacagctgaaagatggatcaggaccaagcgggcttctccaacaaatttcggacatggtaggcgtcaacagacaaggcggaaacgtttttaagagttcgagctgtgtgattcccgttaacgacattagaggaatcgagtcgatgggatatggcaagggagaaaagattcttagatgtaaattggcctgcctctacaggttgatcgacttgtacggctgggcctacggctcaagtacactcataactgccaggttgaaccaggatgacgaacaattcttggtcaacccttacggaatgctcttccacgaagtgacagcttccagtctgattaaagtagacatgcagggcgcggtcctcgaacaaggcacaaccaacttctccgtcaacattaccgcatattcactccacgcagcagtacattccgctagaccagacatcaaatgcatcatccacgttcacactccttccgtagtagctgtatcttcgttaaaacaaggactgatgcctttgagccaggagtctgttgtcataggtgaagtaagtacacacatgtacttaggcggtcatctagatccagaagaaaaggacaaaatcgcaaggaacctaggaccgaacaataaagtcctcctactgaccaaccaaggagcattatgttgtggaacgaccattgaagaagccttcttcaatgccagaaataccgttttagcctctgaatcacagctcaaacttcttcctgtaggcattgataatttagttttgataaatgatgaagtaaggaaaaaaatatacgacgcagcgcacaaagcaccagaaagtactccccgaccggaccaaccctctattttggagggcaaagtagaaagaaagtggcgtgtaggcggtgtagaattcgaagctttgatgaggatgttggacaacgcaggattcaggacaggctacatctacaggcatccattagttaagggcgaaccaccgaaaccaaagaacgacgttgaggtacccccagcagtttcctcccttggatatttgttggaagaggaggagttatatagacaaggactctggagaaaacttgaaggtggtaggaaaggcaacgatcgcagcagatggttgaattcgcccaacacctatcaaaaagtggaaattttggaaaccggaacacccgaccccaagaaaatcacaaagtgggtagccgaaggatcacctagccattcgagcagcacaccagttaaaattgaatcggctcttcagttcgtaccaacaggtactaatccaaaggaattcaaacaaaaacaacaacagatcaaagattacagacgagcagacaaaatttctgccggtcctcaatcccacattttggaaggtgtaacgtgggaggaagctaaaaaaatgcaggacgctacagtaactcaaacaggcgaccatgtagtgctaatgggagctgcttcaaagggcattatccagagagggcaccaacacaacgccatggtatacaaatcgccttacgccaagaatcctttcgatagcatcacagacgaagaactcaacgaatacaagaaagtcgtagaaaagaaagctaagggtgaatatgacactgactacagtgaatcagaaggtctttcgtcagcagctttgaacaaaagaattgaagatatgcaaattaggtctccaacttctgttactagtgagacagaggaagaaagtagagacgaacctcaaatcttacggatagaaacgaagaccgttcccaaacctagtcaaccagaagttgtattaagcgacggacgaactcgaagagaactatatagaactaacaactatgcaggttttcccaaaggatcatttttggagcctaaccccttgcatttccacttagtcagagaaagccagatcgctgttagacagcgccctctaaagatatctttgactactaataatagatcttcagattcccgttctgttgtcgttaaccttgataattctaggtgtatatctgtaaacatgccttccagtacattcgagggctttattgttccgtttgcatcagcattgaactcaagaaatcttcctatgatcaaggaacaagcttcacaaaccagctatgttaacgtagtgaattatactcctttatatattagtcaatatagaacatgtctgacagaacccgacaatacaaattcattcgagagaaatattttgatgaacatgcacgagcagatgctggaagatttgaacgatagctcagattctgagtatgagtctttaaataacaccaaacagcaatactgtgaatctaccagaagggatattgttgagtttgatgaaaatgatcagtgcgacaatgagagtttggttgaagtaacagcagaggtacaggaaatgatgttaaatatagaaagcagcactgatttaaatgaagatggtccacgtgagaaccaacgttcggttgcagtagctgcagaattatcagaaacgactccacctacagaaagtttttcttctgtttatgttgaatatgacgaaaatgatcaatttgagaatgaaagttctgttgggggaaccacagagtcatcagaaattctgactaatgtagaaagttgtactaattcggaaactgtaggaatatttgttgatgtagtcaagcaagcatttgtaatgacagaagacttcttaagtggagccaaagatattttaatgaaaattcctaatgacagatatattgtcaaagaaaactctgatgaaggaattgtggattgtacttttacgaacaaaaccttcagtatcgacgatgataatgaaaatacaactgtattggaaaaaactgagtatgagtatgttcaagatttgacacaactgatagtggactatttaatagagcagtgtatggaggttaaagagcttattctattcccagaggttctacatgattctaacttgcataaattgcttgaaaagatgaaattaatatattatgacgcctttaaggaccagttatgtgaagataaaaatgagctaagactttctttagcttcatcagttctaaggagactggaactcgaagaaaagttaaacaattctggagattctgtaacctcgaacacagtttccgataaaatctttacgatttcagagtttttgaacgatattttggaccatttctttgacaacatcgatttaaggcagtttaacaacttcagtcaggagttaattgcgaacagtgatcttgaagtacattctacaccaaaactgaaaagaagagatataaatggcaacgttgagccattcgaagtgaatacctttcatcaacagaccttgtcaaagtcgggctctgaaatattttggatttctgtgtctcctggtacttctgctaacaatgaacaacctcgtagaaaaattattaatgttgatgatattcctttgagacctcctgttgacctgattagtaaagaagtgttggaccctatatctcaacctcctgttgacttgattagtaacaaaatgttggctgctatacctgaagaagtttgtttagatttatttaacacttcgtcaattgaagaaggatttaaaccagttgatgataattccactttagtaaaaggacttcagacgcaaaaaggagataatacttgtgtcaacgtagagaaaaaaaaagttactaaaattttgactaaccaagtgagtttttataggagccaaagtgtaaatagtactgattatgttagtgtaaaaagagcagtatggaacaacaatactgaaaataaggaaaatgaccccttgaacgattctggagattggatgggttacgacactgcaatgttttgaattgaatttcattttgtatatcctttaccaagttttatttatatttgatatatttctcgtttttaaatacatttttatatcaaagtgtatatttttcttcgtatgggggaagtttttaggggagattaaggtttgaacacaatgtatagtaatgcacaataaataaatccactaacattgaatatagacatgtatacaacacattttttaatcaaaatcactaatcagtatcatcaagaaaagtttcgacctaatttcatcatcaggaatcatctacctcatgtaagaaaatctaaaattatagttaatttatatcctccctctaaagttatgtcttcgtgtcgattttgataacaatttataaatataaagtgaaataatttatcacatttatttacaaaaattatatcaacacactgtaactttttcgacagaaacattttattgagtaatatttggtcctctcactccttcatgccatctctcttgaggtggtaaacagtacggaaacggctgttctctttttcatatataccacgttttccttcaatttttacacagttaaactaaactgtggttttatttttcacaaggcgattacaaacatttggcccttctctgttctttcatttataagttgaattttttctatttttcttttaagttggacttttctttttacatattcctgtttgtttacgttttttatcaaaatgtccccatcttttgcgtctgatagtataccaaagtactaagaataaattattgtaatcaatttttgaaaacacactgatatgaaggataaactgttttttctgttttgtgcattttttgtttgtactgtatacaatttcggatacaaaatcatttcttttatcggtgtttaaatctatttaatgttttactgtaagctcaatctcctgcttggttttatttagtttatagttttttcttttcaaattaaaataaatagataaaaatcagctgagccttaaccactttcttgcattttcctaatttatttgtagtttagtagtctagaataattgtttgattaatctttaaaaattgatcagttagtaaattttgtgttcacgccttaaggtgtatattaataatgtatataatgtaaaagttattgaccttataacttctcttttattgtatttaacgaggaaactgtattttaaacaatgtttactatgtaaaatcttattcactaataaaatatttttcgtcaattaaaa

SEQ ID NO: 123 - DNA, 978 bp, Diabrotica virgifera
cggaatcatgttatcaatggaaaataaactaaagaaatacgaaaaaattaaatttttaggagaagggcaatttgcaacagtatatcaagctcgagatgtagacacggacaatatagtggctgtgaaaaaaattaaaataggtagtcgacaagaggcccaagatggaatcaatagaacggctcttagagaaattaaactactccaagaactgcatcatacgaatataatcggtcttctagatgtttttggacatatgtccaatgtgtcattagttttcgattttatggatacagatcttgaggttattattaaagacaatactattattctcactactgcgaatattaagtcttacatacttcaaacccttcatgggttggaatatcttcatttgaactgggttctacatagggatttgaaaccaaataatttgttagttaattcaagtggcatcttaaaagtaggtgattttggtttagctaaattgtatggatctcccaataggataaatactcatcaagtcgtcacaaggtggtacagagcaccggagcttctttttggagccaaacagtacagtacctgtatagatatgtgggctgtaggttgtattttagcagaattgctgctcagggtacctctatttcaaggagaatcagatctggatcaattgacaaagatttttgatgtatttggaaatcccacagaagaaaactggcctgggctaaagacactatcagacttcatcgagttcaaaccattcaacgccattccactgaagttgatcttcacggcagctggtgacgatttgttagaactaatacagggtttattagtgttaaatccaatcaaaagaaaaacatgttcagaatgtttgcagatgcctttctttagcaataagcccgctcccactattggtaccaaactaccacttccacagagcttaaggaataacagagataatgataaacctactgcctt

SEQ ID NO: 124 - DNA, 1132 bp, Diabrotica virgifera
cctttcatgctctgttatactcaagaggatgctaacgcagaaggcaacgaggaaaacgttctatcgtacgaaccagtccaacagttgcatattaattatacgagacctgttattgtactgggtcctctaaaggatcgtatcaatgatgacttgatatctgagtttcctgacaagttcggaagttgtgtaccacataccacaagacctaaaagggaatatgaagtcgacggtagagactaccacttcgtcgcatccagggaacaaatggaaagagatattcaaaatcatctattcattgaagcgggacagtacaatgacaatttgtatggaacttctgtagcatctgtacgtgaagtcgctgacaagggtaaacattgtatcctggatgttagcggtaatgcaataaaaaggctgcaagtggcgcagttgtatcccatcgctgtttttgtcaagccaaaatcggtcgaatccataatggaaatgaataaaagaatgacagaagagcaagccaagaagacttttgaaagagcaatcaagatggaacaagaattcggcgaatacttcacagctgttgtgcaaggcgacactcccgaagacatctataaccaagtcaaagaagtaattaaggaacaatcaggaccaaacatatgggtaccggccaaggagaaactgtgacctttggccccacccatatggactcttccgtctcgtccacaacggctgcactgaagacgccactatttaaactaatataagatccccaaaatccccctgtagcgaatgagcgctaaaagttttcaaaattgcgcactgatttttgatcaaaaattgtcctcaggagtatttgtttattcatgaagtattcttttgaaatttgttctgtctacttatagtttatttcactttgtttttgattttgttttattattttagattcatatcggtaattcttagtttgggtaaattagtttccagaaatctctaagagattgaaagacattcatttttacatatttctgggaaaatttgtctattataatctttctctttagaaagtgcgtattttgaaatttacagttggtcgaatcgatcggttattctcttcgtgtccgctacgtatttacgatctccc

SEQ ID NO: 125 - DNA, 1151 bp, Diabrotica virgifera
aagaggaggaagaagttgaaattaagattgaagaacatgatgtgaaacctagcgtcagcagactttaccatgctgccgagagcgatcatagctaccacaagggcaagcagagtgccatgcagatggctacctttggaatcgagactccttctgattcagaggaggaaatagatgttgtcaatgtcaacaacgagaagttcccgttcaataaaacggcggtgttttcgttccccaataatccatcgacgaaagatcgccaacagatccagatgcgtatggcaactgctatatccaagaagcgaatacaagcccaagctcaaggcatcaagactatcatgcccgttaggaaaacagccacaccggaggcgtcacctatcaaaaggaaacccgtggaaaccacaaggagtgggaaaaaaactcggcaatacagaacaccggtgagcactccatacaaacgtagacaatacggcaacagcagcgatagcgaaccagaaccatccgagaagagaagtttacacaacaacatggagaggcagcgaagaatagacttgcgcaatgcctttgaagatctgcgagtattggttcccgaagttagcagaaagagagagccgccaaagtggtgatcctcagggaggcagctcaatattgcgatttcctcaccaacacctccacaaaatattcgaaacacttcgatgaattaaaaaagaagcaggaattccttaggcggagagtgtcacaacttcgaaggaatttagcagcaaatcgttaagtaaatatagaatttgtaagaaataatgcgatttgtagtaaagggtgtgtttagaattgtatagaaaaattccgagtatcggagagactaatgagtgactcaaaagagcgaaacatctcagttatttgttatatttttggtttcaaaaaacagaacttgttctagcaacattatatacattatcttaaattttcagtctcgaaagcactaataggcaaaagcaggttgttttatcctgcgatcattgtggatagctgaagtgatcctgagttcaaaaatacaacaaacaaaaagatgttacgtttaccagtcgtattttataccttacattaattgtaattgatttttgaatgccgtttttgttttttcgaaatttggtcac

SEQ ID NO: 126 - DNA, 1529 bp, Diabrotica virgifera
ccgcctgatcccgcagatctttccaagggaatggaacaaactcctattccggttgtgaatggaatcaatagagaaatgttagacttttgtaattattcaattaaacgagttcctatggaaggcgttgatatgaatctcgatccagactatctgtgcggctgtgattgcgatgacgattgcattgataagacgaagtgcgcttgctggaagctcactttagagggagcaaagtataccggaaaagatgtaaatcctacatcggtcggatatatttatcgaaggttgcccgaacaagttattacaggaatatatgaatgtaactccaggtgcaaatgttcatcgacgtgtctaaacagagtggtgcagaaccctatgagtttgaaacttcaagtatttagaactcacaatcgcggttggggtatcaggtgtctcaatgacgttcctccaggcagctttatctgtatttatgctggtacaatacacactgaagctatggcgaatgtggatggtgtggcgttcggagatgaatactttgcagaattggattatatcgaaaccgttgaaaaatataaagaagattacgaagcggaagtcatggaggaggaggaagaacaaaataagaataaacgtcgaaaggaacccgaagaggaagaggaagaagaagaggaatccgtagcggtgatctctaacagcaaatacaaaaggtacaattatgctgcagataacgattttacacctagtcatcccgacaggattgttgcgggagatgcaccaattagaacgcgtctaagaaagagaaacaaagatgacgctaaagatgaagagaacgaagtgaaaggacaaaaaagaagactcaaggaatgaaatgatagaaaataaaacaagaaatatacaaataaaaataattacagagtctaatcaatcaatgaaggcattaatcgaaggactgtctgataatatcgaaactgttaccataagcgacgaagaagatgagggaagagaagtattaagttttaatccacaagcgagtaacttggacgacaaagcacccaattacacctctgtccgagatctctacggaaaagacgaatctgtttatgtgatggatgcaaaaaacgctggaaacattggaagatttttgaatcattcctgttcgccaaacgtgttcgtccagaacgttttcgttgatactcatgatccccgtttcccgtgggtatcattcttttcgttgcaccatatcagagcaggaacagaactgacgtggaattacaattatgacattggcagcgttcccggtaaaatgttgacctgtcattgtgcctcaggagaatgtaaagggcgtttattgtaatctgacagaatttgtactgttctgcaggcaatggagatgtattatttcatacattacgtaattatttataccgtttataatagtgtgctgtattttattaatttcgtgtatcaaaattcaatatttcgttcattgattttgtctttcattgtgctaagtattagaataatatataatt

SEQ ID NO: 127 - DNA, 2613 bp, Diabrotica virgifera
aaacctactgtgtaggttcctttgtttttgttaatgagaacaagtggtgttgtattgagtgaacaagtgaaaaatattgagtataattaattattcacatacaactggtttttgttttcacaactggaatacatatcttattctttaagttaataatcaagttcaacaatgtggcaaacgcaggcagtccatattaccacaaacaataaggagaaccactttcaaaaaagtgaagataagttaactcttggaatgacttctgctatatcaacagcagaaccaaaaccagttgatttggtaaaaacaagggaattaatagaggctctgaaaccttttgatgtattcgaaagtgaacaagaattaaacaagaggatgcacattttagggaaactgtttagtctagttaaacaatggataaaggaggtttcactttcaaaaaatatgccagagagtgttgctgagcaagttggcggtaaagtttatacattcggaagttacagattaggggttcataataagggggctgatattgatgcactctgtgtagctccaaggcatattcataggtccgatttcttttcctccttttatgaccttcttaagcaacagccagaagttactgatctcagggcagtagaagaagcatatgtgcctgttataaaaatggacttcgatggtatagaaattgatatgctctttgcacagttattacttaaagaaattccagaatcaatggatttgagagatgatatgcttcttaaacatttagaacctaaatgcgtgcggagtctgaatggttgtcgagtgacagacgagattttaagactggtaccaaatattgaaaacttcagaatggctcttcgagctattaagctttgggcaaaacgacatggtatatacagtaacgtattgggttacttgggtggtgtatcctgggcgatgctagttgcaagaacatgccagttgtatccaaacgcaacatcatctacacttgttaataaattcttccttatattttcgaaatggcaatggcctcaaccagttctactaaaacaaccatctaacgtcaacttaggatttgtggtgtgggatccgagggtaaatgttcaagatagataccatctcatgccaatcattacgccagcttatccacaacagaattccacattcaacgtttcacaatcgaccagaacgattatggttgaagaattcaaacaaggtctgcttattaccgacgacataatagtaggcaagtacggatgggataagctgttcgaacaaccgccatttttcactaaatataaacatttcattttacttctggttatggcagataattccgatgatcatttggaatggtgtggacttgtggagagtaaggcgaggttactagtaggtcagctggaaagaaaccaatacataaccctagcacacataaatcccgagagctatgccatgcttgaatccgccatggaaccccatacattatgttccatgtggttcataggacttgagtttgccaaaactgaaggtatcagcgtcgatctaacaagagacattcagacatttacggaacaagtcaataaccatgctatcaatatcaagatgctgaaggatggaatgaggttagacgccaggcatgtcaaaaggaaacagctgtcacaatatcttgctccgggagtgacttaaaagagaaaggaaattgagtatcagtaagaacggggttacaccggaacaaaatagaaagaggcagtcttcggaagctactcaagaacacaacgatgctccaagtaaaaagacgaggttgtcagaggatatcgcgtcacaagagttcgatgaatgctccaacacgtcaatacacatagattccagcagtaatttaagtctagaatcagagagtaacattagttgtacatccccggcctcaactccctcccatataaatacaaattccaccaccacaaacgtaccagaaacggtgtgtacgtgacaacctacaactgatgtatatgtgagtcgtccattcgttgctgtcaaataaaataatttttattgtaggtttcttccaagaaacaacagtttatgtggtgttcacgtatgtattaaattacttttccaaaaacagacagaaaaacttttttgaggtaaaatattatcgcaaagagtgcaatgttcttattttaaggcttaatgtgtttattgtgagtgtgcgttaaaaattatcctgtatatacaccaaaaggattcctccgtcgtcaaggaaagataatttgtaggcagatagaccgactgcacatgaaagcggatgatctaaaatccaacgaaaatacacaggatgtatcacttgtaaaatgttcgtttatttgtttatcagtttaaggattctttaatggtttagatggatctagcgatttagttaacctatggagtaatttataattgaaaacataagtttatgaggagtttaaaggtattgtctcattttcttctatttttagttgtataccatggagtctgatattttttcggtttctcgtccaataactaaattgtcgttctatatttccctttagtttcgtcaacactcataacagtctgccctcttgtgtttaa

SEQ ID NO: 128 - DNA, 450 bp, Diabrotica virgifera
atgaggatagatcaactatttaatatcattatagaatacccagaatctctaccggctttagaagacctacgaatatgtcttcctagaacagatctaaagcctatgctaactaagaaactacaaaaagcaatggaaacacgattactacaccctggtgtaagtacacctgatgttctaacagcttacgttgctgccattaggtctttaagggtgcttgatcctacaggactattgctcgaaactgtcacgcaaccggttcatgaatacttgaggagtagagaagatacagtaaggtgtgtagtcaccagtttaactgaggatggtcctaatgatctagcagaggagttggtgagaggagaggccgttcaagttgatgaaaatacaccactggacgaagataatgaagactgggaaacttgggtgccagatcccatcgatacagtaccaaat

SEQ ID NO: 129 - DNA, 1812 bp, Diabrotica virgifera
ttgatcagaagagacaatatatcacatgaatagaataagaagaaagtgaatgatatgaatacgtccctgacgtttataaaatttgacattttacaggaattttgcacgaatttactagaaacatggttttaaataacgttaaagaactaaccgaagaagaaaaattcgatattcagctgcaagctgagcaggaactgggcagactagtcagaacttatacgatcctagaaagaaaccgagcccaaaaatgtgatacaggtggtaaacttctcaaacaacgaaaagtgctggacattttcaagaaggaacaaaaaaatattctcacggatcttgctgtagcgtctgccgatgctagaagagtggaggacgaaaagaagtccaaggaattgaaggatttacttagagagcacgacgatttcgacgctgaaatcactcaacaaaaatcacatattagtgagatcgatggacagattcgaatgaccaagaaaaaggttcttgacttaaggtcgaagcaaattacagacgaaatgtatcaacaaagagtaattgcaggagaaaagacggttcaaactttagaaaacaaactggaagtccaaataaagaaattttgctcaatatcagccgagaatatcaagttaagagaagaaattgatcatttacttttagaaagaaacgattttaacaaaatttgggacagccttatcaacaatttagctgtcggaaagaagttcatgttggacttaatagaacaagcaactatagcttatgatcaaagggaagagtgggtgtccaagctacagattttaagaacaaaagcccacaatgatctgattaatcacattcaggaaatgagggtgttgcaaagaaaaatggacgacgatcagaaactacaagagtttttctcagtgaaatgccaaaaaagaatcatgagacaactagaagaaaaagaaaaaaacaaaaggatgctcaataaagaaaatatggaaaagaaattggaacgttacttacaaattttaattacgattaaggaatttaccggagaagaaaaagttacgacgattgccaacaattttgtaacccaagaagaagaaaattttgcgatgtttaaatatattaatcatttgaacaaagaaatggaagatcttacggacagtctagcaaaattgcaactcaaaattggcgagcaggaggcactaaatgaattgcgtaagcaccaacaagaaactaggctggaaaagctgaataaagattttgaagatgctaaacagatcacgagtcaaaaatctgaagagctgaaagtaattgatcaaaagttgagaacgattataaatggcatcggccaattgtttagaatgtttagatgcaaaaatgatcctctaataaagttattaggtgaaaatcaaaacatacattattataatgtactgctgtatctggaaattttggaaaacaacatcgaagaggcaatggtttctgtcaatttcaaggagacccaaactttggaaagaacaaaacacaaggaacccaaaataacaactttgagacacgtgaaatgtccacccatgatcgaacccatcgagagaatagtcgctactaatccttgccctttgtgcgttgaacatgagcatgtcagtgatgtcatagatgtactgcaattcgcgcttaccaaagaagagatccaggagaggcttaagatcaaaatcgataaaacagaggcagacgacaagttgcataatgtatccgcctgtcatctgccgaaatccagacaaattatacaaaaaagatatcaataaaaattataaagtgatcact

SEQ ID NO: 130 - DNA, 830 bp, Diabrotica virgifera
tttttttcatttttgacaccgactttgtcatttatttaacaattatatactaattttaatattacgattttaattgatataattatatctaaaattcaataatggctagatacgatttgacattgaatcccatggaagaaaccaggtttcttaaaaaacatagagtactggctttaagtttggcaagacaggtccattttagctttcaggaggttgaagccattctcattatatattacaagatacaaaaatacgacacttacgatccaaaaggtattacgagagacgttctgatggaagttttccattgctgtttagatatgacggatatggaaaaagtgattcgaataataacttgcctagacgagaaagctcgagatgtctacatatcaaaagagctttggtgcaacatgttatcgttatttttaagaggaacgattgaagaaaaaatggcattttgtttcaaagtctatgattacagtggaagcggacatctcatgaaggaaaatctttttaagcttttagtgggatctttgaagagcaacatcggcgaatcagatgcggaagaagccgtgaaggatatggtggaagttataatgaagaaaatggatgcagaccgggacggcaagatttcctttaatgactaccgatataacgttctccgccaaccagacctgttggagtttttgggccagtgtcttccagacagacatacggttcacaaatttttgtgtacctttactgaaaatactaagatccgattctataagttaaaattaggcacaagtataatgtgaaattaggaagtaaacgattaaaagttaaaaaaa

SEQ ID NO: 131 - DNA, 2072 bp, Diabrotica virgifera
gttaaatatgatacatcacaccaattcgaggattataacaactacaggttaactttacgttaaagataacttcggtcatccatcacacggctgattagctatctattgacaggttgtgtatatagagcagttccttgtaacacgacttgtctcttctattataatgtttgtctcactattccaatcagttttgaagagtttttaagcccacacttcataacatttggtagatgaattcctcaatttaactatgaggataaaagtacgcataaagtcacaaaaaatttccccgcttttccgtgacatccttattccgcaagttatattgtttctgcgcttcctatagacatgggatttggactaggagtcgagctcatcgagctcaaagtatcttctttcaacctcaacttattcggatccttctcctttttttctttatccttatgtttatgttcgtgtttgtgtttattaacgctaaaagacgtactattttaccgaaatgatgttattactacaataagttaatgatttttgaacaaaaaataagtttgtttggtgtgccttctacataatttttaattataagtttcatatagaaataaatttttaatcatggccgcgccaaggagagccgcacagaccgtaaatcaagaaaacgtaaattcccgtcttgctgtgaaatcaaacgtaaatgcgccattagaaccgctaaaaagaccagcacttggcgaactcggcaatacactacaagacacccaaaaagcacaaaacggtcttgctccaacaaaagatggttttaaaaaacctgaaggtactttgcaacccaaaaaagagacaatcaaaactttgactaacaaggaaaaggcaattccgatcaaacctagaactatcctaaaaagacaggaaagtttagtaaaaccgttacaaggaaaatgtacacagcctaaagaagtaccacgcacatcgacactagtaaacaaaaaactgtctatcgttgacccagacgaaagtagcaaaaatgatcctcagatggtaaccgagtatgtaatggatatcttcaaatatcttagagacatggaattgaaattagctatcaaagataacttcctcaaagaccacgaaactacttccaggatgcgtgcaatactcgttaattggttagtcgacgtacacgcaaactttaaagccacgcttgatactttgcatatatgcattggaatcgtggatagatatttacaggcgaacaaaaaagtaggaagaaatacgcttcagttagtaggggcctcagcaatgttgatagcatgtaagtatgaagaaatatatgttccagaattagacgactttgaatatgtatgtgatcacacatttacaaaacgacaaattcttcaaatggaaagggaaatactgaaggggttagattttagtttaggtcgaccgatttcggtgcagtttctccgtagatatacaaaagtgactcaatctcgcgtggagcaccataacttaggtaaatatatgttggaattggtattactcgaaagcgatctagtgcacgtaagaccttccctactggcagccgcagcttgttgcttgtcaataggaatattgaacgaaactatggatttgccgaaactgtggaaccccacctgtgtacagtacacgtcctacaattacaacgacttcaaatcgataataacggaactcgcttatctcttagtcaaaagcgaacagtcgaaattccaagcaataagaagaaaatacgccctagcaaaattcggcaaaattagtcttaatgttaaattaaatggtcctcttgtgagaaagttgacagcggggaaaaagtgatatttccattttatcttttaaccgaatttttatattttatatcagttttatatttagtgtcatttttatttacgttttagtacattttaataaattagattcaagctaaagactattaaaagccttcaatatcaatttttgttagtcagtttttatttgacggaatgtgaagcaacaatggagcaataaagttaagtagtccaggctgtttgctcgcccccgtcaggtaa

SEQ ID NO: 132 - DNA, 1517 bp, Diabrotica virgifera
gacagttaatacgcgaaaaagaactaatacaccgatgaaactatcgtattaaaataaagtttaaagtttttaaattatgtgtggattagtttagtgtttagtgttatgttgtgttagtgttttttttctgtgactaagcctacaataatttcttcgagcaacaggaaaaaatttaaaacggagaggttctgaacatttgtatctgaaataaattaataaagatgaatcaaacgtgtaaagtgtgtggagaaccagcagctggtttccattttggtgcttttacctgtgaaggatgcaagtcattcttcggacgctcctacaacaacctaagctcaatatcagaatgcaagaacaacggcgaatgtgtcatcaacaagaagaaccgcacagcttgcaaagcatgtcggcttcggaaatgtcttttagtgggtatgtccaagagcgggtcccgatacggtagacggtccaattggttcaagattcattgcttactgcaagaacaacaacagcaacaacaagcccatttagcgaatgtttcacagaacatgaaaccaccacagaagacgccaccattacatccgcagccgccactaggtatgggccttcttggaatgaattcctttcaaccgccacttttacatttacccaaaacaaaggaagagttaattttattgggcttggatgaatacaaacactcagcctctcctcaagtcagttctcccgaatcacacaattcagactcatcaatagaactaagcgatgctaggaggttacctttgtttcctggactattacctcctacattcctgccacctcctggtctccttttccctccaggatacccccctctataccctggcttactgcaacctgccaataacaacagacttatgagaaaccacaatcatggtgtcgaagcatttaacaagcgagtgttcctggatgcagtccttaaatctcagcggtcgccaactcccgaagaaagaataactcccatatccactgaaaccataatccaagaagatcctatcgatctcagcatgaaaacgaacagcgatagggggtcttctccagctcatagcgaccaatcgggctcaggaacggagcgaggaaatggtagcgaagccgatgaagaaagtgattgcgagtcagatagagaaatcaaaaggatgaaactccacaggcccacgccgctagatctcacgacgaaagtatgatggaacatatttttcatattactgatattgctttcggagtacctgaataatctagataaaagattttcaggtcactgatcagtttctgggccagtcttgaagctatctggatttccgtttcgaaactgtcgatataatgcagatcgaaaatgaaagtgttcaatcttttactcaagaagtcacttggcggttttcttaataatatttagatttaaaatggaaaaagtaaaaagaaccagtagaatattaagtgtttacatttcattgctaaactgattttggttatttgtgattgatttt

SEQ ID NO: 133 - DNA, 3192 bp, Diabrotica virgifera
tacacgttttgctactttttgtattattttttccaagtgtattaaggataaacctttcacgggattaaaatttcgtgacaaacaggcctactattacaagaaacttcagtgttgtgtttacttcactatacaagtttgcaactatgggtacaaatactaaggacgacttttcagaatcaaaagaatacggcgtaaaatctgaggaattcgaagacttttctgagactatgttagatggaagcgataagaaatcattagaggacggctcattgtcagatcctgataactgtggcatgtgtggtggcccattggttatacctcgaatgctgcactgtttacatacattttgcgaagaatgcctaggcaaaaagcttgtcggggaagctggagatgctggatccacagacacttcaatccaatgcccgatctgtaactattcaaccctggttggaacaaagaagttagctgctctaccgcttgatgtctcaaagacaaatgttaccgacgtttccaactcccccgatttgcattgcacttcctgcactgccaaagaaatggccaagtccaaatgtaacacctgccaacaccttctatgcaacaattgtgacaaggctcatcattttatgagatgtttcgagtcacacaaggttgttgctctcgaggacatggttaaatctggtattaagatcacagttcacaagcctctagtatgcgatttccatcctggcgaaaatctcatcttctattgcttggtgtgcagtgtaacagcttgcacggagtgtattaaagttgatcataaaggccaccagtttgaggggatactcgactctgaaccaagagttagacaagagatggagggtttggttaagaaaggcaaagaaaaaatcgaaaacctcaccaaagcttctgctactttgaacaataacatggaagaactttcccaccagcgctccaccgctagagatcttatcaatgaatcatatcagagttacaaggctgttcttgagaaatgtaaggatgatattttagaagagctgactggattgtatcatgaacgtgagctagtcctcatgcaagagagtaatgagttgggcaataccattgttaacttagaagatgcctgtaaatgcacttccagcttattggaaggcggtactgcacaagagatgatgtatttaagaacagcacttgctactaggttgatgactttaaaccacaaatcacccaaactggaaaaatcattcagtattgagttcaaatctgacttggataagtttgaatatgctatcaggagtaatttcggaaagtttgctacagaggaagatgtcatcgtgaaaacatcacagtcttctccagttttacctgaattggctcccttgaacatcaacgggatcaatggaatcaacaactcaccacctgctatcgtcacaaacggttgtagcgcaccttcggtaacaacaaccagtccaatttctttacccacatccatgcaatcttcattcgacggggaacttggaaacaatttacaaatgttgatggctcagagtcctcccttaccccacgtcaattcaaaccaagggttttcccaagggttttctagtattgccgagtacaatatagcacaactagccactttagcagaaaacacaaacagtgctgccacgtcaccaactacagctccgttcaatattgccgatattttgaacaatgatactgccttcaagaatattgcaacgttagttaagctggcaggaaccaatactactccgtcgattcctagatccaacaaagttagtcctatgcagatccgctgcaagtttggccagttgggacccggcaaggggcagttcaattctccacatggattttgcttgggattggaagaggacattatcgttgccgatacaaataatcatagaattcagatctttgaaaaaaccggaacattcaagtttcaatttggcatcccaggtaaagacgaaggtcagctgtggtatcccaggaaagtagcagttatgcgcaataccggcaaatacgtcgtatgcgatcgtggcaacgaacgctccaggatgcagatcttcactaaaaacggccatttcttgaaaaagatagctatacgttacatcgacatagtcgctggcctagcagtcactgtcaatggtgagattgtcgccgttgacagcgtcagtccgacagtattcatcataggggagagtggagatctgctgcgttggttcgattgcagtgattatatgagagagccatccgatatcgctattcatgggaaggaattttacgtttgtgacttcaaagggcacaacgtggtagtatttaacgacgacgggcaatttttgcgtagaatcggatgtgagaacctaaccaactttcccaacggaattgatatatcagatgcaggagacgtattgattggagattcccatggaaatcgattccacgttgcagtcttttcacgcgatgggggcttgatttcggaattcgaatgtccatatgtaaaggtctccagatgttgtggattgaaaatcacatccgaaggttacgtagtaaccctcgccaaaaacaatcatcatgttctggtattgaatacgttatacatcctgtaaaccccgaataatatagcgtcgtcgacgaatattttgaccttagtccctcttcccgaccaactgtttcatgaatatgttgtgttagttgacatcctctgacacatgttgtgttagttgacaaccctgacacattctcacccgaccctcgcctgttgagctgtggcatttaacaatttttgataaaaatatttttatgtatttaatcttcacagttcgtacccagaaatagactaagaactccccgtaaaaatatgagtagataaggtatcggtacgacacaaatcaaaatgtgcgtagaagaaagttaacattgtgttgaaacttacgctggtcacggcttttgttaccagctgctcaaataattatgcttatattcgtattaacgtttacactgttctttaaaaactatttaaacattgatataaggtttgttccaacagaacgaggaaccgtcatgtaacgattatgctcatgcgcagtaagcaaaatatcccattggaacgtattattttgtttactgcgcagtaaagcgtcattgtcacatgacgatttttcgttgtgttggaacaaa

SEQ ID NO: 134 - DNA, 1578 bp, Diabrotica virgifera
tatttttaaacacagatttgaaatgtgggactcttttactattgatgattgtcaaacatgtccgtataatagcactacaaatatatatgaccaaatggaagttccacacttggacaaggaaaatattcagccgttcaatcacataaaaaatgacgagctgtctctatacgacaatggaggcagtatcacaaaataccgcgaagcacctttgtctcatactcaccgacccctagaagaacacgactcaaattcgcaagattctggctacagtgcaagctaccatggagaaaaatttttgtcttatgcctctccagtacgaactgcaagcacatcctttggctctatggtctctatggaagatgaatattttgatttctctgatgttgaacctttggagaaaccaaacttacctcacgatttcaataagctcataacaaatcctttgattaacagaactaaacctgaagtagtctcatctccaaaagacactatcataagaccacttttcagaagggctttatcacttcagcctatcagtgagaacacacctaatagtagaagggtccgaacaagtttatttagaggtgaacatgaaatcagatcatttaaaagacctgaacctccgaatgatctagacagtacaattgtgaaaaggtcaaagatatttaacgataatgatgatagtgattgtgaagcttcagttcctgtagccaggaccagacctatactacaacgcgcattctctgctacagaagacagtattatgtgcgcagtgcaaagatctgcaattgaacctgaccttattggagattttacaaagaacttcagtcttccgttaacaatcagtcgacaccaagatttaaaagccatcacggcagatacactagcttcactgatgaggggagagtttagtgatgctgtggattcttacaaagtcattgactgcaggtatccttacgagtttgatgggggccacattaacgatgcacttaacttctacaccaaagagcaatgcatgcaactactaaactcaacacctgatgttgctgaaggttcccacgcaagacatatattggttttccattgcgagttctccagcgaacgtggccctaatctataccgatttttgcggaaagaagatagaaacaaaaacgaaagtgtatatccttctcttaactttccagaaatctacctcctggaaggtggatataagaagttctttgagactcatccagagttctgcactccagttgcatacaaagaaatgctgcatcctgatcacgaagatgaatataggcactttcgatccaaatcaaaaacgtggaactgtgattcacgccaacgtctattgaagaaaaggttaggtgtgtaaaacttgtttaggatgccatataactttatagtacaaataattagcttatctatttggttcagttcatagtacctgttgtcaaaaacacgagatatattattttaatcattcagacagttcatgtctgatgaaccaaaatctccacaccacttagtggtctaggtgaagtgccttttactattatttgttgcctgataccagaagaa

SEQ ID NO: 135 - DNA, 2465 bp, Diabrotica virgifera
cgtttagtagtacatagagaaatcgcttttagttttaatcttttctgtgttggaatattgaacaaattctaatgattcgtaaaataacacttctgttaaaaaccaaaactgatagtttgttcaaaaaaagtacaatttttctgggcttgctactgaaataatgtgccatactctaattgtggaacaaattgtaggtatatgttgaaagtgaacaaataactaatgcttacaataatgtcgacatcaagtcaaaataatggtaaaaagagttcaagcagctctattgttaacaccccttccagtactcccattaccaatcttgcaaatggtagtagtagtacccaaggaacagcacatagttcacctccacctaataacaatgctccaaagtatggtaccctagtgcctaacagaatattcgtgggaggaatatcagctaacacaacagaaggagaattgatgcaactttttagcaactatggtactgttaaagctgctaaaattatacaggacagggctggtgtgtcaaaaggatatggtttcatcacctttgagagtgaagatgatgctaaaaggcctcttagagaagctgaaaacatagtgctaagagaaagaaaacttaatatagcacccgctattaaaaaacagccttttagtcgagcatttgatgcatccagtccacctgctgttgctgcaaatagtgccagtcaattcttttttcctccgggtgctgccgtgccatattttcagagtggagttacatattatactcagccagctcctgctgcacctggagatcccactgctcaacaacctgtttatcaaccccctccaatgtatcccacgcaaactggtcctccacaggcagctacatacccttctatgatgtttcctgctcaaactatatatatgccgcaacagtatcccatgcctattccgtacgagtacaacttctaccagggtaacggaccgtcgctgccaactcagtatctggccggaggccaaagcggtccgggaaactctcattgcacctcattaccatcatcaaacagtccacccagacccaattgttatggtcaacaggtgcctgcctataattcaggagatcccgtgtactacaacttgccaatatacggagccactttggaaggtccgccattatacgctgatgccttcgatctaagcgctagtggagcttatgcggaggaaacctacagcggcatgattactcaagaaaatgtagaagcttctcttggatcatcggtaaattcaactcgtgcaacttccgataattttacgcaacatatggatcaatctctcgttgagtctgattcaaatattgttaatgttggaggtaaaccaccagcacataaatcttcagagacaattgtttctactccttcccagcctcaggaggagagaaactcacacacgcctattgtttcactactttccatagatcatcaacaggaaaaagactattcatcaatgcaaagcggtcgtagacggaaacttctgattcaaagcaatcaaaataacgtacccatgtatcctacaaacggatacgtcaaccagtttgtcggatataatcctcaacaaccatccccaccttcattcggtccacctctctataacaacggctacggttattctgaatatcgtcgatttaacggatacccagatctcaggtcaaataataatagtaataaaccgaggagacgaatatacgaaaataggcggtcgaacgatcattctagccgttccagtcttcgcacagactcaaactcatcggctagttgtgttgacgaaaataaaaacgaagaaaaaacttttcgaactactgttaacactcctccacctgccccatactcacctatgaccaatcatcaattcaaatttattaattacactaacacgaaaaacgtttataatcataagtacgctcacacgtttataatcataagtacgctaacaacaataattattataatagaacagctacacacaatgaccgatttaaacataccgaacctttagcgaataaaaacaataacagttccatttacccattaacaaataatttcctaaataatagccatacccaaagtaattctgattcccttccctcccaaaattcccaggtacatgtgacgactacgggtcagagcttcgtcccggcggctatccaagctcagacgaaacgcaacaagcgttctttgagaagaagcggtgccagtgccggaggcatcaacgaaatcggcgccggtgacgcccctttaccaggcgaagaatgcgaagatgtctacaagaagctggaaacgcttaagttgtaacgaaaaagtggtatcttttcttgtatatttttttctatttatttaagactgtacaataatgtaaaatactagaaatttaatgtaaactaaagaggaaaaatatataatacatatttattgaagatgaaaaaa

SEQ ID NO: 136 - DNA, 275 bp, Diabrotica virgifera
caaggtggaattttaaggttataccgcacacctggttgtacagcagcaaaaaagtttgaaattgtccagaaacttcagcaaacatgtaaaaatctaaaggatattcaaaccgaaatatgttttcatatcgaatcaacaagtgccttggaagcaaaagacgttaagattttgaaatgggttcttcaagatcctctccatccccaaaatttaagcgaaaagggaacgctggtagcgaaaaatggtacggctttggttgaggtaggacctagatttaa

SEQ ID NO: 137 - DNA, 275 bp, Diabrotica virgifera
atggtggattctttaaagtccattttcgacgaaactcctgaagatgaaagtctctcccaaaagattttacaatcagtggctattgaggtcagttcggcagacaaattatccaccaagatctgcaaagagtgcgtagaaaaagtaactgactggtcttcgtacaaagaacgatgtctccaaaaccaaaagaaattaacggagttgttagttgcgaaagaaggtccagaagttttggttgtacctgaaattatacccgaacccgaagcaccacttcc

SEQ ID NO: 138 - DNA, 275 bp, Diabrotica virgifera
aatgatcctgaatacgacttcatatctggattcgttcatttttgtggacaggctggactagttggtatacaaatattgtggacaaaagaatccgaaattgctattaagaaagcaagagtagatagaatggctatgaaaattacaaataaacgatttctcgacctcttaaatgctctcattgatcttacatcaaaagatttaacaaaaatgcaaagaataagatttgaaaccatggttactatccacgttcatcaacgagacattttcgacaacat

SEQ ID NO: 139 - DNA, 275 bp, Diabrotica virgifera
tggctcctccaccatacgcagacctcggcaaaagagcaagagacgtattcggcaacggttatcactttggcctaattaaattaaattgcaaaaccaaaacagccagtggggtccaatttagtacaggtggtagttcagaccatgaatctggaaaagtgtctggatctttggagagcaaatacaccgtcaaagattatggattgactttcacagaaaaatggaatacaaataatactttggggactgagatcgccatttcagaccaaggtattaag

SEQ ID NO: 140 - DNA, 280 bp, Diabrotica virgifera
tgggcaaaaagaaggtagaagagagtgaaagtgaagaggagtattctgtagagaaaattattgataggagagttgtagatggaaaagtagaatattatctaaaatggaaaggatattcagaagatgataacacttgggaacctgaggacaatctagattgtcctgaacttatttctgagtttgagaggaatcgtaaaagtaagaaggctgctggcaaagaaaagaaaagaacaagagataattctacatcttccgtggattcaaacaattcatccactaa

SEQ ID NO: 141 - DNA, 275 bp, Diabrotica virgifera
tgagttttataattattgcttttaaaaatttcctacataccatgttgcagttattatcttttggtaaaaaaactattacaaatagtttgagtgtgtatgtaaaaactattggtggcaacactttaactgtagatctagatcctacatgggacattaaaaatgttaaggaaatagtggcaccacaacttggattagaaccagatgaagtaaagatcatttttgctggaaaggaattgggagacgaaattaaaattgaggaatgtgatttaggtcag

SEQ ID NO: 142 - DNA, 275 bp, Diabrotica virgifera
tgaagggagaaaatttaccccaacagaacccagtgccttcaggaaatgaaaaagatgtcagtaacaaacaggaatcgtctaaaaatcgatcggatttatcagtcagcatttacgaacaattaacactaccattaagagatggccgctcagtatctctcgatactggcgctagcggttcctcaactgtacccgaagtgacacctggtagcgatccttcatcagaaattaatcgtttgtttttaaaggcaaacacagaaagtttacaatcgttaagg

SEQ ID NO: 143 - DNA, 271 bp, Diabrotica virgifera
atggaactgccaaaaggtttaaaaccagtgggacctaatgtaactgaagacaccattatccagagtgttgctacagcactccatgtttcttctcaaccagtgacaggccagacaagtacaaaaacactacttgaaaaaaatccaggagtatttctcgatcccaaacaaccattagtacacgctgtaaatatatcagaggatgatatcaaacgtcaagaggagagagttgcattagcgaggaagaagttacaagaggctctaaagggcaacc

SEQ ID NO: 144 - DNA, 275 bp, Diabrotica virgifera
atggttcgtcatggagaatcagaatggaatgaaaagaatctattttgtggctggtttgatgcaaatttaagtgaaaaaggtaaacaagaagccattaatgccggaaaagcactaaaaaatgcaggatacaaatttgacattgcatatacatctgtccttacaagagctcagaacacacttaattcaataatcaaagaaattggccaagagaatttggaaactataaaaacttggagactcaatgaaagacattatggtggcctcactggcttaaa

SEQ ID NO: 145 - DNA, 269 bp, Diabrotica virgifera
tgaatggtggaggacctacagcgcaaatcgtagaaagagaggggtggaaacatgataaagattttgttggacacaggaaagctgtcacttgtgtgaggttcaactccaacattctccaaaaacaagaaaagaacaactctaaacccactcaatattgttgttgtgccattggatcaagggacagatctatcagtgtttggttaacttcattaaaaagacctcgtgtggtcataaaagacttatttaataatagtgtattagatatgtca

SEQ ID NO: 146 - DNA, 269 bp, Diabrotica virgifera
tgggatttaaagataaccagatcgtttatatatcgataggcatgtcgaggaatatgaagaaacgggagtttatggatgcaccatctttacacccgcctcctcctcgggaatgtttaccaacattacttcttctacagccaaattactttgagcagctattttccttaatgcacacacttagttcaatgaaaattcaaattaaaggagggtgccaattaccacatacaagagcccaagttctcagcagaagagtatgggatattcttagc

SEQ ID NO: 147 - DNA, 270 bp, Diabrotica virgifera
tgaaggttttaccatcgcctactagaacagctttacccaaatgcgaactgtgggatccagaaactatgaccagtgcactcgatgtcgtaattagagcagcaaaacactcgtatcccgagccagtaatgttagtgagaggttttagccagccagtcaaagttagttttgtgtatagttgtaaccgattctatgttcagttagtaaaaaaagaacaggaactaacaactcttatggaagagcttcaaagtttatgtctagaaagtgctttta

SEQ ID NO: 148 - DNA, 273 bp, Diabrotica virgifera
tgtcgagcgccgataacgttaccagacgttcggcgtatctagttgtcctgaaaatatgtaaattgatactgacatctgtcgcgcacgtcctggtaagactgagtgaagatcacactcctccagaaaatgaggctttcaacgaaaataccactccaccgggaacctttttgagacaggcattacgaaatgttcctggacactcggatcatttactgcgacaagtttccatgaaactagctcaaggtttagcgcaattgatggtatccgaaacgg

SEQ ID NO: 149 - DNA, 275 bp, Diabrotica virgifera
tgtttgaagctcaagaaattcacgcagaacataaagatctcattcacgatgtcgcttatgattattatgggaggagaatggccacctgttcaagtgatcaatttgtgaaggtttgggatcaaacatctgatggaaagtgggtgttaacatcaagttggaaagcacacagtggatctgtatggaaagtaacttgggcccatcctgaatttgggcaagttttagccacttgctcctttgacagaacagcagctgtttgggaagaaatagttggagaa

SEQ ID NO: 150 - DNA, 275 bp, Diabrotica virgifera
tgagtgaaaagagcgtgggaaccatgcagggggtttcgggcgaacgccggttgcgccaactggaaatgttgtttcttggcgggcctgtgctagccaaagaacaaagttttagtatcgaaaccctcatagatatattacttgttctctacgatgaatgttgcaattcgagtttaaggaaagaaaaaacagtttcagattttatagaacaagttaagcctgtagccagcacagtaaaatctttaagattgactcgtgaagatttcgagataatcaag

SEQ ID NO: 151 - DNA, 271 bp, Diabrotica virgifera
tgggatatggcaagggagaaaagattcttagatgtaaattggcctgcctctacaggttgatcgacttgtacggctgggcctacggctcaagtacactcataactgccaggttgaaccaggatgacgaacaattcttggtcaacccttacggaatgctcttccacgaagtgacagcttccagtctgattaaagtagacatgcagggcgcggtcctcgaacaaggcacaaccaacttctccgtcaacattaccgcatattcactccacgcagc

SEQ ID NO: 152 - DNA, 274 bp, Diabrotica virgifera
tggaaaataaactaaagaaatacgaaaaaattaaatttttaggagaagggcaatttgcaacagtatatcaagctcgagatgtagacacggacaatatagtggctgtgaaaaaaattaaaataggtagtcgacaagaggcccaagatggaatcaatagaacggctcttagagaaattaaactactccaagaactgcatcatacgaatataatcggtcttctagatgtttttggacatatgtccaatgtgtcattagttttcgattttatggatac

SEQ ID NO: 153 - DNA, 275 bp, Diabrotica virgifera
tgctctgttatactcaagaggatgctaacgcagaaggcaacgaggaaaacgttctatcgtacgaaccagtccaacagttgcatattaattatacgagacctgttattgtactgggtcctctaaaggatcgtatcaatgatgacttgatatctgagtttcctgacaagttcggaagttgtgtaccacataccacaagacctaaaagggaatatgaagtcgacggtagagactaccacttcgtcgcatccagggaacaaatggaaagagatattcaa

SEQ ID NO: 154 - DNA, 274 bp, Diabrotica virgifera
tgcagatggctacctttggaatcgagactccttctgattcagaggaggaaatagatgttgtcaatgtcaacaacgagaagttcccgttcaataaaacggcggtgttttcgttccccaataatccatcgacgaaagatcgccaacagatccagatgcgtatggcaactgctatatccaagaagcgaatacaagcccaagctcaaggcatcaagactatcatgcccgttaggaaaacagccacaccggaggcgtcacctatcaaaaggaaacccgt

SEQ ID NO: 155 - DNA, 272 bp, Diabrotica virgifera
tggaacaaactcctattccggttgtgaatggaatcaatagagaaatgttagacttttgtaattattcaattaaacgagttcctatggaaggcgttgatatgaatctcgatccagactatctgtgcggctgtgattgcgatgacgattgcattgataagacgaagtgcgcttgctggaagctcactttagagggagcaaagtataccggaaaagatgtaaatcctacatcggtcggatatatttatcgaaggttgcccgaacaagttattaca

SEQ ID NO: 156 - DNA, 272 bp, Diabrotica virgifera
tgtggcaaacgcaggcagtccatattaccacaaacaataaggagaaccactttcaaaaaagtgaagataagttaactcttggaatgacttctgctatatcaacagcagaaccaaaaccagttgatttggtaaaaacaagggaattaatagaggctctgaaaccttttgatgtattcgaaagtgaacaagaattaaacaagaggatgcacattttagggaaactgtttagtctagttaaacaatggataaaggaggtttcactttcaaaaaat

SEQ ID NO: 157 - DNA, 270 bp, Diabrotica virgifera
tgaggatagatcaactatttaatatcattatagaatacccagaatctctaccggctttagaagacctacgaatatgtcttcctagaacagatctaaagcctatgctaactaagaaactacaaaaagcaatggaaacacgattactacaccctggtgtaagtacacctgatgttctaacagcttacgttgctgccattaggtctttaagggtgcttgatcctacaggactattgctcgaaactgtcacgcaaccggttcatgaatacttga

SEQ ID NO: 158 - DNA, 275 bp, Diabrotica virgifera
tggttttaaataacgttaaagaactaaccgaagaagaaaaattcgatattcagctgcaagctgagcaggaactgggcagactagtcagaacttatacgatcctagaaagaaaccgagcccaaaaatgtgatacaggtggtaaacttctcaaacaacgaaaagtgctggacattttcaagaaggaacaaaaaaatattctcacggatcttgctgtagcgtctgccgatgctagaagagtggaggacgaaaagaagtccaaggaattgaaggattta

SEQ ID NO: 159 - DNA, 274 bp, Diabrotica virgifera
tggctagatacgatttgacattgaatcccatggaagaaaccaggtttcttaaaaaacatagagtactggctttaagtttggcaagacaggtccattttagctttcaggaggttgaagccattctcattatatattacaagatacaaaaatacgacacttacgatccaaaaggtattacgagagacgttctgatggaagttttccattgctgtttagatatgacggatatggaaaaagtgattcgaataataacttgcctagacgagaaagctcg

SEQ ID NO: 160 - DNA, 274 bp, Diabrotica virgifera
tggtaaccgagtatgtaatggatatcttcaaatatcttagagacatggaattgaaattagctatcaaagataacttcctcaaagaccacgaaactacttccaggatgcgtgcaatactcgttaattggttagtcgacgtacacgcaaactttaaagccacgcttgatactttgcatatatgcattggaatcgtggatagatatttacaggcgaacaaaaaagtaggaagaaatacgcttcagttagtaggggcctcagcaatgttgatagcatg

SEQ ID NO: 161 - DNA, 272 bp, Diabrotica virgifera
tgaatcaaacgtgtaaagtgtgtggagaaccagcagctggtttccattttggtgcttttacctgtgaaggatgcaagtcattcttcggacgctcctacaacaacctaagctcaatatcagaatgcaagaacaacggcgaatgtgtcatcaacaagaagaaccgcacagcttgcaaagcatgtcggcttcggaaatgtcttttagtgggtatgtccaagagcgggtcccgatacggtagacggtccaattggttcaagattcattgcttactg

SEQ ID NO: 162 - DNA, 271 bp, Diabrotica virgifera
tggctcagagtcctcccttaccccacgtcaattcaaaccaagggttttcccaagggttttctagtattgccgagtacaatatagcacaactagccactttagcagaaaacacaaacagtgctgccacgtcaccaactacagctccgttcaatattgccgatattttgaacaatgatactgccttcaagaatattgcaacgttagttaagctggcaggaaccaatactactccgtcgattcctagatccaacaaagttagtcctatgcagat

SEQ ID NO: 163 - DNA, 272 bp, Diabrotica virgifera
tgtgggactcttttactattgatgattgtcaaacatgtccgtataatagcactacaaatatatatgaccaaatggaagttccacacttggacaaggaaaatattcagccgttcaatcacataaaaaatgacgagctgtctctatacgacaatggaggcagtatcacaaaataccgcgaagcacctttgtctcatactcaccgacccctagaagaacacgactcaaattcgcaagattctggctacagtgcaagctaccatggagaaaaattt

SEQ ID NO: 164 - DNA, 155 bp, Diabrotica virgifera
gctccaaagtatggtaccctagtgcctaacagaatattcgtgggaggaatatcagctaacacaacagaaggagaattgatgcaactttttagcaactatggtactgttaaagctgctaaaattatacaggacagggctggtgtgtcaaaaggata

SEQ ID NO: 165 - DNA, 1624 bp, Diabrotica virgifera
ggggagtagtacgtagtacggccggttctaaggtaggcggttcgttgtggtcgtgtggtagtatgccaaccggttggagaaaaatctgtttttcaccctttagttctcaatagaatgaaatcgtgagttctgtgacaaatttcaacaaaaatcgtttataaaaccatcaaagtggcggccaatacaggatctcgcacctccaaggataatatgctcaaatttctcacccacaaattaagaactcattctataaatgaggataactatgcagggaaggccgatgaagaccatgattctggtacggaatcagatgaagagattgatgctccagtatcaggatcagcatcctgttcagaacgcgtttgtaacgtatcaccggcagacacaggatgttcgatggaaagtccagctcctgatcaacacgatgctcacagctccgaagaagagttggaagttatcaatagcaatagtaaaatgaggcgatcaacggcacctcccaggccgctgagggctgcgtcagtttgtctagctgaaaaacgaaagtggtctcaaattggagacgcgcagaatcgaaggtatacacccgaaaacgaagagaacatgtcccactatagtaatctatctccgtctccttgttcgccgttccatataaaatgttgtagcgaagatggtggacaccatattgaacattccggctcgtcggatgatgaggtgcaccacttcttgtacacacgggctactcctgtacagttccgcacttctcctcctttagaagcggtaaaacctgaacgaagatcaattgtaacgagcaagggtcggtcgacgagcccgcctgccaaactacttcactacgaagattccccaagaaaaagaaccaagcacatgaaacatgcacatatccagaggccataccttgatttttgaaaaaatgcaacagatgaaaacgaggtcagtaacggcctggcgccacaccgctgaccacacaggagagctgtccgtttactgttggtgagatcagcttaaggggcggactccgtcgccctccgacttaagtaatcaccccatggagggctgcagttcgtcatcctcatcatggcctgataatccttcatagtctacaaaataactctaaccgaaactaaaactactaaagaattgctgcatagaagcactgaattggtacacgtggtttttggaccgacggttttggatttgggtagttggcgtagactggaatacttcaaatggaatagacgtgcgttgaagatcttgcgtcgaaagcatttcgcagactatatagttttgtaattttatatggactcattaattgcaataaatattttccactcaaatttgaaggcagaatacaggaatggtactaaaacgggtacaactcttaagatttcttaattaactcaacaagatgttcctaaatactcggctagaaatcaagtgaatataggtacgctgaatattgtttgaacccaacagtaatgcccggtttcacaaacagctgttaattgccttattcattatgaaagttaactgtgacagctattattaaaggtcatataaatatattgtatgaccaaaattccgcagaattttgtagtcaatcggtata

SEQ ID NO: 166 - DNA, 1348 bp, Diabrotica virgifera
aaagaatacaaagagaatgatagtttgaacatttctgacaatgaaaacataagagaaggagttactttggaatggtttaataagaatttaaatgacacccagaaaaatgctgtaatgcaggttctttggggtactgctagacctcttccatatattatttttggacctccaggtactggaaaaacaattactcttgttgaaacaattttacagttaacacgattaattccttcatctagattattagtaactgcaccatccaatagtgcagcaaatttaatagctctgagacttattgattcaggagtacttttaccaggagatcttgttagattaatttcatataattatgctttaaaagaaactattcctgataagttattaccctattgtgccactgcaggcttggctagagaagatactgttgtttcagaagtaaataacccaaatggaatacaatttggtagcaatatgtctactttaggccgaagtagaataactgttgcaacctgtagttgtgcaggaacgtttttccagttgagcattcccagaggtcattttactcatatagttgtgacgaagcagcacaagctggagaacctcatgttatgattcctttatcttttgtaaataaaaattctggccaaattatattagcaggtgatcctatgcagctagggcctgttatattatctaaagttgctaccgaatgtggactagcagagtcttatttggaacgaattatgagcagatttccatattgtcgtgatccagaaggatttccagaaacgtctggatttgatccaagatttgtaacgaaattattatataattacagagcccttccggacattcttactttgtacagtacactcttttatcataatgagttgataccgactattgacgatgaaactagcaatgaagcaaaactgctaacttctcttcaagatttcttaccagtcaaacgtgataagctaacccgaatactatttcatggagtaattggtgaaaactatcaaacagcagattctccatcttggtataatccccaggaagtagcccaagtgttttattatgttaatcagttttacaggcttggagtaaaatctggtggtataggtattgtcaccccttatattaaacaggctaaagaattacgaacagttttcacggaagcagaatttgaagtaccaaaaatcgggactatagaagaatttcaaggtcaagaattcgacatcgtcattatatccacggtacgttcatctaaagattttatcaaatcggatcttacttaccacttgggcttcgttgcacaccccaaaagattgaacgttgcgatttcgag

SEQ ID NO: 167 - DNA, 6699 bp, Diabrotica virgifera
gttagattctttgacaggtctaattgattatcgagtgctttctttgaaaagctcgacatggagtcccaaaacatgaccatgatgcactcggccggaccgattcagcccccaccaagggaaggggcggcccccatcccaacagaaggggtaaccgcaaggggcacggaccacttcacggaaatctaccgacagagaggttatccttgggggaagaagccaaattgctctactctcaagaaatggcctccatgccgagcaagactcccgtcagcgtcctccaggagttgctgagccgtcgcggcatcactcccaaatacgaactggtccaaatcgagggcgccatccacgagccaatcttccgctaccgcgtgttccttaacaacgatctggtggccaccggaaccggaagatcgaagaaagacgccaaacattcggcagccaagaacttgctggatctcttggtcggaaaagtgactcccgaacaagccaatcagaccaacggaacgcccggagcggctgatatcaccaatcaggtggtgacatcgttcgatgacaaagtgatgggcaatcccattggctggctccaagagatgtgcatgtcccgcagatggccaccaccattctatgaaatggaacacgaagagggactaccacacgaaaggcagttcaccatcgcttgtcatgtgttgaaattccgcgaaattggcactggcaagtcaaagaagctagccaagagaatggcggctcacaagatgtggcaatccttgcaggatttacccgtggagggtaacaatctgccttctacatttgcgagtgacgaagagactctcagcttcaacgccaaggacttcaactttgttcagttcttgcaggagatcgctagcgaacaatccttcgaggtaacctacgtggacatcgaagaaaaaacattgaccaatcgccaccaatgcttggtgcagctatccactttgccagtggccgtctgctacggaacaggcaaaactccgaaggaagccaagggctcggctgctcatcatgccctcgagtacctcaaaatcatgaccaaaaagtgaacagctatcgatacacagtcatagatccaatcctataattatccatttcctgtaattctggtttctctatagttttgtcatacgtttttgaggcagcaaatttctcaagggcacacggcaacaaaaagtgataatggatacaaatttgactactgtatagctttcttctcttggtgaacacatactttattcgtcatcgctccccacgagcgtttctttagtctgtatattttcttgtatcacttattgcgtctttgctttggtcactttacgcgcgaaaaccattatgttttactaatttttcaataaagtacactttatttaagaacaggggagaaaagtcacgagaatttgaaaagcgagcttcatgatcccctgaagaatatatcttgaagaactattattttttaatttttcatcacagtgatgtttgtttcagaacaaaccgggaaaagtattatgagaatatgaaatttaaaagaaaatttgaaaagtatcatgagttttgtgattctccgaagagtatgtctcgaaagacttcgactttttactatttttgtatgcacaaaattcgttctacatatgaaacatgtcagttatatattcacctttatatgtcacattttgtggttctttaacgaaatgtcaagagcataaagtatgtctagaacgattttacctttgcgcgaaaagtgaccacaagcaatgtcaaagagaaggatagcaactaattttacaagctatactttgcatagaattagtggtttttttctaaaatcaatttacatattatttttgacttgaataaatttttaaatttaaaaatgcgtgtgtgcaggtatatttatcacatcattcgtcgtgtaccacatctcggatcttgctactaatattcgattcgataggtgctttgtctggttaactttagtgggaaggtttaggtatttgtggtatctgtcgatgttgccagaacgtaagatatcctaaactcacttttttccgaaaaaatatcgcaatagctcaaaagggaacaatttttgtcgagttattgatttcgaggaataatacgaacttccatagattcaaatgaagtaaacaacatacgtttttcatttaaaatgaactcacatatgcaatgcattcaacattccatagattcagtgaaaacacgccatcgggttctattttgcgcttaggccttcacctcgtttcaaggctatccttaacatcttatctcgtctatgatatatcttctccaagtttgtgctgggcaaatcaatcaatttgcctcgaaatctaaggttatattacttttatgaatcgtgataacatgcataaaatataataaaaatttatagttttttgcatttttattcggcttattgtaatattcctccatagttcttacatccttgtttatttccctttttgtggagaggtactatgtgtgtttggctagattctgtttgacattcgaaaagtaaacgtcagtttgcgtttcaatgcatcgataagacgaatggtaaagctgctaaaaaagcaggaaaagcccagaagaacgttcgactttcacttcattctatcggcctttcttctctttgccgtattttattttgtaaggtgaggtatttgtacatgaagttgtctgcccctttcttaatcggttctgcatgaatgccatctgggcccggggctctgtgatttcttagtgtcaatagtgctgccgttacttcctcaagcgctggtaacgctttatcgggttctgctaagtggtaagtagaaggtaagccacttaagcacacatgttacataaatgtcaaaatttcgcaaatatatatcacataatttgtttgtggacataaaggaaagaaaaaaatgtcaaaattttgcaaattatgtggcattttgacatttatgtgacataatttgcgacatttgacgtacggttcaagtagctgaagtaaaagtgtgctccattggtttatcctctactgtacaactgtttacctgtgtatgataaataaacttttttcgggtttggaaaaatttcaaattgttcaggtaaaatcttgcttcatgattgaaaatttgcaaggtttggaggagttgtactaatttgtgtaattgaagttcgtattatttcctcgaaatcaataatgcaatgtgtttaaatttttgtcgagtcaaaagcgaagaatatttgaaaatttctaatattgcgatatttttttatcgatctggcttcaatgtttgaatgatgattatataacgagtagatagctttagaggtaatacactattattaggcactagttattaattataatcatcaatattatctatcgatactgaatgtaattttttatatagtgccccgatgatatgatatgtatttattatattgtgaaaagggagcatttatttgatgcaaagtatagaggttgtacccaaacttttcggggtgcaatcttcttttccggaaaatgctcgaaaactcaattggcgcacattcagcaggttttttaacagtttgaaaaccttgataaatggaacgaaattaaacacgctgagaaagctatggttgagtgaaaaaggtgggaaatgttgactgttgtagctgattaaggggtgtattctatatttcggttaaatttaagaggcttttaaaatttaacgtttagcagtcttctttttagaataacattgacattctataaagacgttagagaggttcactaaaaaatattaggaatccactacaaggttttcaatagggcattctaacatgtcaaaattaaatcaatatggcggctgacgggcaaacaaatgttatttgtcagttcttaatatggttttagattcgtttttagttgcctttctttgtaattttgttttgtacaatgattaatttaacattttcagtggaagaattaatttaaaaagataatattcctcatttctgttgtgttttgaggtgtggaatgcgaagtaattgtgatacaagttcagttttatcagttaccatgagtgcaaattttgagtgaaatgagagaagaacagtggttaaatgctataaaaggtcctataaaaatgctaaataactacctgtgccatgctagtagtctaccaacaactttcaaaaatattcactcatgttcatttattcaccggttaaaactaaataaagtcgttcaagtaattctacaactaaaaacttcacaaaactgacaacaaaatgttcggaaaatacaactagaaaactattaaaggtaaaaaacaaaatgtggtacaaatataaacagagacaagttttgtatttccgaccatattggtgtcattaacgtcaagtctcgaaatgccctgttagatacagcaaattgatcgtgtttaaactacttgtaatgtagaagttgtccaaaaactgtcagaggccaaaacacttaaaaataagaaattgacatgaagtgaagacttcttttttagctaaatctattgtaagaaatcctttcgcaaaaaacgatcgcagaaacttttccatccacatcggggcggatatcagagaataataacttaaatagtagtagattttgcgttgtggtgaaaaaaaaatagagattggaacacattaaaaatattcataaatctattagagctagaaattttaagtgtaacacatgtggtaattttttaaaggaaatcactctggagcatcctagcgtgtgttctacgatagttcatcatagtactctcttttttttgtaactcattttcccattaaccatttttatttatcaaactatttaatcataaagttacgattttaagggatatagaatacaaaaatattttaacagacggtaaaattttagaggcctcttaaatttaacgaaagtgttacagaatacacccctaaggcaagattaaaaaacggcaacgaaggaagaggaaattgctggaaattttagtaattctcacattgtttccgaaaactcaggaaattatctgaaaaactgcaaccgatatttcataatgttgccagatttctgcaaatgattgtattttaccttccagtattcgcgtagattttcaggagaagcatagttgcatcgagagaccgatattaattgaacgttagtttttgaaaaaaaaaagccccaacaacttgggcttttaggatgaataatacgtacatattcttcaagaaacagaaattttaatcagataaactaaatgtggtattactgttaatgcagagaaggttcctatcttcaatgagatgatggcgaccacattgacccatcttattctattcacatcagtcttgcctattcacaatcttgccttgtagaatcaactgtatgaaaattaaaaatctaatttttatattgaaatggtgtagaagacaatgcttaaaaattgagaaaattgtcattacaaacaacggtatttgaagatggatcgtatgaagacgaggataccgaatacacagtaaatatgtgtaaataagatcacgagaactagacgaaaaacacagaaaggaacttagtgaaaacaatagttgatcagaaccactaaatgttagtatggaaaacagggaagaagatgaaagtgaaatgactgaagatcaaccagtaggaaatggcattaataatacatgtatatcttgagcgcagaaacgacgaaataaaaaggaactcgaagcaaaggaaaggaaaaatctaattttagagcaagctaagaagaataaagagggacccagaattgttaaaatccttaaaatcagctgtagacgcagtactaccatacaacgtgacagtgtgacaaacaaaatttcgaccaatcaagtgccaaatttcatacaattttcgatacaagaacttgcatattgttatacagggcacaaatgtacgtacaagaaacgatacaagaaaatgtatatcagaaatgatattagaaatgatacaagaaaatgcatagtgtcatacagccataagttggtaaatgatttaagaaaagttacagcagattttgtaagacaaaacaaagatgacttcaaaccatttatgtgcaatgaattaggtgaatccgaagtagttagcgaggaacagtttgagaattattgtaaagatgttgcaacaacaaattaatggggaggtcagttagaactgcgagctttatcgaatattcttacttactccattgaagttattgaggccgcgattccttccacactgtaggaaaaaattgcagtttgctcactttcatcaatatcaaaaattgaactttgacccggtctgccagaccgtgcgcgactactggaaggtttaaaatacctttttatcgcatattccccataaaagtgaaatctggcagtacagtgttgcgaaattgagggctttttctggaaaataagattatgctctttttgatttttgtgaacggtgattgtggaagagcaaacacctcgactggttctttgggtataagcgacggtgtttcctcgtcggcaatcgctgggttctaattaacatatatgtcaatagaaagtttttaggcacaaaccgtcaatacatataggcatgctattgtcgaagatgtctaaagatccctagaactgtagaattgt

SEQ ID NO: 168 - DNA, 1463 bp, Diabrotica virgifera
cctccgaacagcattatcaaaaaatgaatccaccgaaaatttagacatacaattagcgggatcttcgaaaaaagccttgctgtccaatatcgagttcgaatcggctgggagctatcataatactgtcttagataggctaaaatcgaaatatatagtgctcagaagtcctgaatcaccacccccaagtaaacctgaagatgacatgaactccagtgaatccttaaaattagcaaaatatgaactatttccactgagcgatgtacaactcggttggaataactgtgattggtctgttggtgctggaatggttaatatgggaaatacatgttatttaaactctactctgcaagctctctttcatgtaccagcttttgttaattggttgatgtcagacaaagatcatactgccatctgtcaagattcaggaggtctctgtataatctgcgcgatgcgcaaaactctccaagactcacaacaacgtaacgccaactcgatccgtccattgttgatctacaacaaattgagattggtgtgtcgaaacctcatacccggtcgacaggaagacgcccacgagttcttgagatatctagtcgaagcgatggagaaagcattcttgagccggttcaacaattataccgaattcgactcgaaagtcaaagaaaccacccctctgaatcaaattctcggggggtacctgaggtcggcggttaggtgcttgaagtgtggccatgtcagtacgacgtttcagcattttcaggatttgttgttagatataagaaaggcccaaactttggacgaagctttagaattgtacttttctagagaaaagcttgacgacgaatcttatcagtgcgaatcttgtcagaaaaaggtaccggccacaaagcagttttcgatagaacggacgcccatggtgctttgcatccaacttaaaagattttcagttagtaacaataaaataacgaaacacatcaactttagacaaagactggatctaacgaagtacgctagacatcgccctaacgtacctctgatctacaggctcgtagcgttggtcacgcacatgggccctaccgtcagctgcgggcactacacggccgtcgcgcaagcaccttcagggaatttctttcaatttgatgacagtatggttagaccaatatcccaccaagcagtgttcaacaccaacgcatacattatgctatatgagttggaatcctcgccctactcacctaaatctgcccccgccacggtaactagcaaactgaagacttcaaccccaactgccgaaaccagttcagtggcttgttcctcgaattccagcaccgtaaattcggtgaccgcctccacaaagtcgtacgccaacggcattgggtttactagcgggaaggtttatggtccagaactgcctccggataggatagagaatagtcggaatggatatgtgacaagcagtaatggtaaag

SEQ ID NO: 169 - DNA, 2813 bp, Diabrotica virgifera
aacagcaacctggagcgagacaacagcagcatcaaactgttcccccacaacagactggtcccccacaacagactggtcccacacaacagactggtcccacacaacagactggtcccacacaagggcagcaaaaaggtgcccaacaacagcaaacgggtcgaaatgaacgtcaacaacaaagttccccaccaaagcaaatgggtccacatggagatgtaccacaacaacctaaatcggcaaacgggcaacaaaggggtggaccacaacaacagcgtaggcctcaggataggcagcagacagcttctgttaaagaattgacatctcgtatgagtgaactgcaagctggtccacttgtacctatgaggttaagaaaccctgaacctggaaaagcaggtcgcaaaatacccgtagaaacgaatcatctcagcctcgcgctaggtaaattaaacacggcttatcactatgatgttgatttggtaccagataccccgaaaaagtttttaagaaccgtgatggaactctttaggcagcaacattacccaaaaagatatccagcctttgatggaagaaaaaatttatacagcactactatgttaccttttggagaacaaaaagaaggcgaggttactattcacgacagtcaaaatagagagaaaatatataaagtgaaagtcaaatttgcaaattcggttgatttatcccccttgaaagattacgatttatctagagcaactccgacggaagctatacaagtggtcgatattgttttacgttgtgctccttcacaaaatctacttcaagtgggcagaagttttttccataagccagtcggagaaattatcgacttaggagaaggcatggaaatgtatcacggattttatcaatcggccattcgaggctggaagccacttttaaatgttgatgttgctcataaaccgtttcctaaagctataccagttatagaagctttgcttgaagtaataaatgcagacagatataataataaacttacgagaaatgaccttagcagacctcttgataggcgagatttggaagttttcggcaagtacatgaagcagttaagagttgtttatgaaattccaaatttgcccagttctagaagaagttataaggttaacggtataaatgacccaccggccgtgaaaacctttaaagatgcgaataatagagaaattaccatccaacggtattttgaaacagaaaaaaggtgcaaattaagatatcctcagatgccgacactatgggtcggatcttcagctagatcggataatcctatacttgtacctattgaattgtgtacaatagaagataatcagacaattaatagaaaaatgacagaaggacagacaagaaacatgataagatatgctgcaacctctactacagtacgcaagaataagattatggaaggaataacacgggctaattttaacaaccatcccactgtacgagaattcggtttttcagtttctagcgcatttgaaaaattagatgccagaatcttgccccctcccagattaggctatgccggtaaagaagtgaatgttgataaaggaatatggagaggtgacaaattcttccaagcggtcacgattaacaaatggacaatcgtgtgcgctgataggaggccaccaagaccagatgacttacggaacttagcttcacaattacttagagaagcacgcggaagcggtatgcagattggtgaagcagaacaaccattctgtacaattggtgacagaaatatggacatcaagaaatacttcacatctgttaaaggcaaatatgatgtaatctttgtcgtcgtaccaaatagcggaccacaatatagttacgttaaaacagcagctgagattaatgtaggctgtttaacacaatgtgttaaagtaagaactgtgttaaaaatgaattctcaaacggcgttaaaccttttacttaaggttaatgccaagttaaatggtactaatcattttctatctacccgtccgcccattttgaatagaccaaccatgatcatgggcgctgacgtcactcatcccagccctgattcgcaacatataccgagtgtggcggcagtcactgcatcttatgatccaaaagcctttaagtacaatatctgctggagattgcaaccacccagacaggagatcatcgaagatttggagaatattgtggtagaccaattgaagttcttttatgagtctaataaaggtcaaaaaccccaaagaattatcttttttagagatggagtatcggatggacaatttgaacaagttacaagtgccgaagtacgagctattcgagcagcatgcaagagagtccaaagagaaggttatgaaccggcaataactttccttgttgtccagaaacgtcatcatactagacttttcccattgaatccaagagattctcatgacagaaatttaaacgttccagcaggtacttgcgtggacacgcatattacacatccatttatgcaggacttctatctagtttcccacgccagtatacagggagtggcgaaaccaacaaagtattgtaccttgtgggatgacaacgatatgtcaaacgacgacattgagcaacttacgtattttctatgtcacatgttcactcggtgcaacagatccgtaagctatccagctccgacgtactatgcccatttagctgcggccagaggcaaagtctacatagaacccgaaaatgtggatttacaaaatttaaatagggaatatgaaagatttaaaatccaggacagtatccagaagggactgcctatgttctttgtctaa

SEQ ID NO: 170 - DNA, 4075 bp, Diabrotica virgifera
caaaacaatcggagctgagctacgcctagagtcatggttcaaaacgagtactacgaaaaggccagcggggcaaaggcccacttccacggggcaggcagcacgtcccaattcggagatagatacaggagacgctgacgatgaagacctaaaacttatcgacgtcatgagcgagaaggaagttaatgctaagatcgaggagttattgagtgacatgaacctcaacgacgacaaaaagaaaccccttagagaaatgcccatggaacagaaacgtgcaatgttgaagatgcagaacaaaaagaaaggacaacacgacacgggcagtcgattcaacgatcccgaagattattacagatatctggatcaacacataaatccggagtacttgcagttgaacaaatgcctgaactgtgtggaaagcttgagggtagccttgactaacaacccagtcagttgggtagagaagtttgggactataggaggtttacagaaacttgaacaagtattggatacgggaataaggaataaagatgttcgacttcaaacagaatgtttacgatgtttagaaaaattcatgaacaatacgacgggacttaaagcttttttcaaattttcaaaagcgcatttgactgtagccagatgcttggaccacgaaaagcctactgtgatgttacaagccttaaagattcttgcacctctatgtatcctgaacttggaaaagagcggcgaggaagaaggtgtaaaaaaggtgcttagagccattaccgaggtgggagagatacattcgagagaacggttcctatctgtggtacttggaatcactgccagcgataatgccgaattacagagtatgtgtttccaattcatcaatgccttattaagcgaaacggaggacttcgagttccgtatgcatttaagaaacgaaattgtaagaaacggactttacgaaaaactacaagaactaaggaacgagagtaatccccaactaaaaactcagttcgaaatattcgaaaacagacgagaagatgacgcggacgaatggcacgaacgatttgacaaggtcaggctcgacatggacgatattcaagattgcttcgaggtcttaaaaaatatcactctagatacgccgtcggagccttattttttgagtatcttgcaacatctcttgttcattaaggaagatgtcaatatcaggccagcttattttaaattaattgaagaagtgataacgcagatagtactcaataaggcggggctagatcctgattttaagaaaaaacatatagacatcgaccttcagccgcttctagaggaacttaaagacaaaccaatgcaaattgaaagtgcagaagtcgagagcctaaaaaaacaactcgaggaagcaatcgcagcaaaaacagaggcagaagccaaactagaactcgtccaaggcagagcgggtaccacacagccttccggaaaactagatccagctttagtaaacaaaatcaatgtgccaccacctcccccaatgccaggcgccggtgcgcctccaccacctcctatgccaggaatgggaggcggtcctcccccacctccgatgcccggaatgggtggcggtcctcctccacctccgatgcctggaatgggaggcggtccacctcctcctccaatgcctggtatgggtggtgggccaccaccacctcctatgatgcctggaatgggcgggggaccgccgccgccacccatgatgggtggtatgcctccacctccacccggcatggttcccttaccgggtttggccaggccggatttgttaccacacggtttaaaaccaaagaagaagtgggaagttacgggaccattaaagagggccaattggaaaacgattctaccacaaaaaatgtccgaaaaggccttctgggtaagggcaaaagaggaagaccttgccgaaccagatattctcgacggtttggctaagaagttctcgtctaaacctgccaaattaccagaagatgtgacagataagagcaataatacgggaacgatgaagaaagttaaggaacttaaagtgttggacggaaaaactgcccaaaatattagtatattattaggtggatcgctcaaacacataccatatgaagatattaaaaacgctctactcagatgtgacgaagctattctatctgataatgttactgaacaacttattcaatacttaccccctgccgatcaattaaacaaattccaaaacttcaaagagcaatacaaagacctgaccgaggctgaacaattctgcgtgaagatgtccgaagtgaagaggctgttgcctaggttgaaatctctcagctttaagcatcattacgggaaaagggagcaggatatcaaaccgggaattgttgctgctacagctgcttgcgacgaagtgaagaagagtaaaaagttcgccagaattttagaactaattttattgatgggtaactatatgaatacgggaagtaaaaatgcgcaagcgttcggatttgaaatgtctttccttaccaagttaacctcgacaaaagatgtttcgaataagcaaacgcttcttcattacattactgaaacgatagagaacaaatttccagatctgcttaatttttacgatgaaatgcctcatatagatcaagccagccgagtatcgttagatacgatacagaaagcgttacaacaaatggacactagcataagaaatttaaagacggatttgacaaataacagggtacctcagagtgaagaagacaaatttttagaagttatggagaaattcgccgaagaagccagagaacaatgcgacatcatgcaaaaaatgttaaagaaagtagaaaacctctacagcgatctagctgaatattacgtgtttgacaaacagaaatacgcattagaagaattctttgtggatttgaaaacgttcaaaaatagtttcctgcaagccaaagccgataatcagaaagaaaaggaaatcgaagagaagaaagagaaggcgaggttagcgaaactaaaacaagaaaaagaaaaggaagagagaaacaaacgaaggctgattgatatgaatccttcagaaacgcaagaaggagtgatggacagtttgctagaggctctttctacgggtagcgcatttggaagggagcagaaaaagcgaagaggccatcgaccagcaggagctgaaaggagggcccagttagttagatctaggtcgagaacggccttaatagctggaagagaattaactagtgaaatattggcgtagcattaagtaataataaagaagaacgcacaacgacttgaacgctcaaaagaaatatattatataaagaaatattttatacgttgtaataatttattttgtaaattgtttttccatttgtaaataataatccgtatatgtatatttagaaattgaacgaatgaatctcttatatatagttttagttttatcgcagattattatgtaaatatgataaaaaaataaaaaaaatcagtcttttgttaaactttatattgccgtaaaagtagattagttttttatatattgtttttgaaattgaacaaattcttgtacgttttgaggtagtgtgcttttataatatgtaaaatgttgtaattattatatactttactgttcgaatttttgttaggttttgtattttagttttatttatttctttaaaaaaaaaatgtgtatggttaattaaccaaatatatgcgtactgttttgtttataagtcattttaagttaagttcaaaaagctctttaattggacctctgttcttgctattttttgtagtgggtgacatcaaatacaagatggcagataagtttatttcagaacagaattttcattcctaaaaaatcctataaaaccaattaaaagatctgttgcgctgctatgatgttcttcctttcactgcactaacagaaagagtagtaccctgtaccagtatcttcctggatcattcactctccctggaccactttttgttacaaaaagaatagtactagggagtcatcattatttacgtttgtcgctatacaggatgttagtgaataagtgtgagaaac

SEQ ID NO: 171 - DNA, 2294 bp, Diabrotica virgifera
cttctaccattgatagtgctatttataaataaaaatattttgtgtttattagaaaaaaactgttttatattaaaaaagagaaactgtatagtagtgataaagtgtatggtgcaaaatgctgttttctaatgagatctgggcggctacaaaacggcaggcattgaaaaggacgaattcctgccaggatagaattgaaaggatccctcctagctcggaagaacttttcgaaaatatcccttggatgaatatcatggctgatctgactgttaaatctgctatagctgaatatgagtttaaacgtatgctgaataaggagctgtctcatttctccgaatctagcaaatctggcaatcaaatatcggaatatatctgctccactttcctagacaaacaacaagaattggacctaccctcccttcgtgatgaagtccctgagctcctcccaaaacccactcaacgcaaagaacgtgcccgaggaccgcattctaccatgtctcaaatatcaggtgttaatcgtaaaccactttgccacaccaattcttttaccggtgagaagttacctttgcacggcattgaaacaccttacgaagaagaattaggcaaaagtttgattatgatagatcaatggggtatcgatattttccgcatcggagagttaagcaacggaaagcccctaacctgtgtagcttacacgacctttaacaatagagacctcttgaagacaatgaacatcccgccgaagacgtttataacttttatgatgaccctagaagaccattatgtgaaagaaaatcctttccacaattccctgcatgcagcggatgtggctcaaagtacacatgtactgctgaatactcctgcattagaatctgtatttacaccgctagaagtgacagcagctctattcgcagcgtgcattcacgacgtagaccatcctggacttaccaatcaatttctaattaattctagttctgagttagcccttatgtataatgacgaaagcgtactagagaatcatcacttagctgttgcctttaaattactttctaacgacggttgcgatattttctgtaatatgaccaaaaagcagagacaaactcttaggaagatggtcatagacatggttcttagtactgatatgtccaaacatatgactcttttagctgatctaaagactatggtagaaacgaaaaaagtagctggttcaggggtacttcttttagataattacacagatagaatacaagttttggaaaatttagtgcactgtgcagatttaagtaatcctaccaaacctttggatctctatagacgttgggtagatctcctcatggaagaaacttgggcagatctagtgcatcctgacgctgcagcaaggagacaaagaaagagaatccaaaatggatatcagtcccatgtgcgataggcattcagctacaatagaaaagacccaagttggtttcatagattatatagtacatcccttatgggaaacttgggcagatctagtgcatcctgacgctcaggatattttggacaccttagaagaaaaccgcgattggtatcaaaacgctataccaccgagcccccctccagaagagactcccgagtcccagcgaccaggcatcagattccaagtcactttagaagaaggcgaaggggaatctgaagaaggtccgatgtgacggaaactagggggcctctgtagaaagctcactgaaaaggtgcagcaatggtggcgtatcaggcagtaagcgcaagtgcaggcgcatgcgcactgactgacgaacgttacaccgcgcaggcgcgggtttgttgtgttttgcaatatatgcttgactgaaattttgaatttttcgggctgagatgccagcctgttcttatatatcgcagagttcctgggagtgtactcttttttcaattttttgttcggttttttagcaaatctggtagatacatcgcttcatggccaaatcgtaagcttaaataatctaggaaatacttttcaacagattcataaccatccctaaacataaactaaacagtttttaagaaaaaatagtaatttgtaaatcttttatgtttatgaattttgaaaccgtattgttaaatgtaaaccatgtaaaagtattgttaatttcaaagtgactgtaaacagacttaaaatagtaagtcgatttacagtgtgacaatacaaatataggcatgtcaatgtagctttttatttatatgaaatagcggtataaatcttcaaaacattaagataactacagtaggaaaaatgaaagaatacc

SEQ ID NO: 172 - DNA, 3145 bp, Diabrotica virgifera
ttttgatacacaatatctcttgcgaattatatcagaaattttacaaagctacttttttcgattttactttaaattaggaggtaaaaagtaattgtctttcattatatcaaaaagacatctgagcattatgcattacaatatgacagcatttttggggaaaaaatatgaacgtttttgttttctgaaaaaccgtcatatttttttccaaaaaatatttgattggtgtaatagcctaaatatatttgaaaacgctaaatactggcgaaaaatactaaatacaaactaaatgataatttataatttatcacaaaaattccaaaatggtcttatttaagtgtccagtaaactagtgctgctaatttggagataggactagctcacaccaatcatagcttaaataaaaaaggaaagcagactttaacacctcattattttaggttataaaacaaaataagtatttgaaatttatgtcatagttataaaaaaacatggtatagttttttactacaaaagtcaggttaagtcatagtctatacaaactgacgtcacttgtagttcttcaatgacagtttatacaaactgatgtcaattatagttcttcaatgacagtggggcgattggaaaaaacgtttacagcattgccaacaatttatagtaagaattgtgtttgttttgatggcatctacaccaacgaccaaccaatgcaccgccagactgagagttttgtttacgctgacgacctcggtatcgccgtaaaagagaaaacacatacacaagtaaagtcgacaatggaagaggctttaaacgtgatgtcaacttactacaaacaaaactcattaaagctaaaccctactaaaacccaagtatgtgcattccatctcaacaaccatttggcgcatggcaaactgaatgtatcttgggagggacaacgcttggaacatactgataggcccaaatatcttggagtgatactagactggtcactaacatataaattccactgtccgagcacaagacaaaaggtttctgagagaaaaagacttctccggaaacttgtagggagcaagtgggtgcaaacccccaggtgttaaagtcaatagctgaggccttatgtttctcaacaggggaatatgcttgtcccgcctggggtaaatctatgcacgcccaacaagtcaccacggcgttaaataaaacatgtagaataactaccagttgtatgaagcctacccttctacccctattgtatcgggcagctggattcgcatcaccagatgaccgtagatgcgcctcacaatgtggggaagttgaatgaaaggcattaattatacgagtttgacgacccgtcaggaaccagccgacttaaatcagggaaatagtttatgagaaatgtcagcgtcaaactacccgacctgttccctctacagccagaacgacctaatggaatgaacctggactggagaaactggcggacacttaaccgcatacgcaccggttttgtccctctaaaacagaacctcattaaatgtggcatcaagacagataacgacgctctttgtgaatgtggggaaatacaaaattttgtggttctgacgtcagaaaacttgaatgatgtaagttaatttttgtagtaaaaacaccatagttggacaattactataagagaaaaaatatcacaatgttagtaggtttttccatttgactttctacagaaaaagcttagtaaaatgcaatcaactaaaagttcacttacactgtctcatttttaacaaaaaaaatgttttataacctaaagcaaaaggttttttttgaaaacttaaaaagccaataaacaaatttcactttacactgttaaaccgtataaatattttgtgcttactctaaccctttttctgataaattccgtttttagatcccacatcggcactattacaaaaagcacaggagcccaggagaaaggagaagggtcgaaaataaaatagagacagcaggactagagatttttttattaaaaaatcctaaactgtaagttcttcagtatcaaatgtttttagagatagcaatggtatgagaaaagcttaacaagaaaaatgcgctttattataattaaaaaaatcacatcatgttccggaaacttatctcagttaagtttgcgaaacactctcaaaaaaaaacttaaaatatcctaaatactcttaaaaaacaatgataattgagaccacagtcataaattatgattggcaaattggcgcagtcgtgttaggaggtcacgtattgtataaaaggttttaaaagacaaatttttttgttataaatttaatattatgaccctcgtaacataactggaaccacacgatggacaacgatgaaaaaattaatgattttgaccgatatataatatatattttatgttgtttgtttggtaaaaaaaggaaaatacaatattgtccgattctatgacttttttccatgtattttttaatgatgatgcactcggtatacgcattgccggttcgctgttattttgaaaaaaatacaaatttaataataattaatttttcgccgcacggcatggctgcttacagcggcacacactatctctagtaaccgcaggtaattaagtaatcacctagcttttctaccactgacgctgcttgctgaggttggattggatcttcataaagggatactacaacagcttgtgtcgttttcatgcaatgtacaccaactttgcccaatttcgccctaattacacggtctgtgccagagaggtatatgtatctgttaccggctaatgttacgcctgaggatgtgagaatgtcttgtttttcgaagccctgaactaattttgctagttcttcttttgatacatcgaaattttctgatttagcccaaacgtttccgtcgtggccagcgattgccgctttcgtaacgcattttgaagccaagagctgtttgtctacgtaatcctgccagctcatattgttgtaaatttaaaaaatcactgcacacacggttctactcactaataaaattggtgcaattagagcagttgccgcacgacgaactgaagccgaatacttttgtctaccaaggaagattttgtagtggcagcggaagctctaaagagacaagtgcgactgccccc

SEQ ID NO: 173 - DNA, 1208 bp, Diabrotica virgifera
aaaaggatgtttagcacacaattaggaaattttccatttgctaatactaggaacagccaagagacaacttccaacagtttgaataatcatataatggatgccaacaatggagctggagatagtaatgatggttccatagataaaaccaaactaattattaattacataccacaatatgccactgaaggtgaactaactcaaatattttcaaccgttggaaaactggaagatgtaaaaattatgagagactttaagactggttacagttttggatttggttttgttaaatattccactgaagaagaagcagccaaagcaattgcagttctaaatggatataatttgatgaataaaagattaaaagtctcctactcacgcccaccagggacaggcatgaaagattcaaatctctacattacaaatcttccaaaaaacattactgaacaagaaatagataacatatttaggaaatttggcgaaattgtacaaagaacgctgttaaaagataaaattactggaatgccaaggggagttgcttttgtaagatttgctaagggcgaagaagcacaagcggcgatcaatggcttgcatggaacaacgttggcaggttcgatgctacctcttagtgtaagagtagctgaagatcatggaagacagaaggcacagtatgtggacgtgtgggatccgatgggttttaatagagaatctgaagaatcattttcatttggagacgaaggtcctgacttagaagaaattcttattactgaagtgtcatatagaagacccctctgggacttatcaattcactcgacgaaaatgcaaattgacaatctttgggagcagatctatcgtgtatttaagaataaatattcgataggttttctaactaacatgtggtctaatcttaaagaaggctatataagagataagagatcatttccgtattactatcaaatgagatttttggatgagtttgaaaatgttgctctatgtggatctagtcgaaggcatacaggaagtcctttaggaaaaaaattaaaaatggattaccagccaccttcacctgacggcgttgatgattttttgcaactgttgggagaaggcttacgtagattgcccgctggaaacagaactaagttacagtttaaatttgtggaattacttaaagatgaagaatcgcgtatatcagattaactttttaatatgtc

SEQ ID NO: 174 - DNA, 2297 bp, Diabrotica virgifera
gggacctctaaagcagtaccatgtggataagacattcgccgacagaagatacaaagtacagtcagcgaggacatacttctacctcaatgaagcccagtgcgagaagaacacggaaacattcatcaaatgcttggaaaccatagcagagtttcagcaaacatctcaaggctctacttatggcaccgggatcgcagctgttaaattcactgctttgggcagaccacaactgttgcttcaactttctgaagtaattatgagagcaagacagtacatgaccgaaattgttggaggtgaaggtaacgttttgtgtcatcacatgaagtatgaagatttggaggcgaaattcgaaaaaattcaagataaagaatccttacgaaaattcttgaagcaagttacatacgataaacaaggtgttctccacttattcccctggtcgggtattattgacgagaaccaagagttgagtgcttccttcagagttccagacttaaaatcaggaaggatgatcaggctattaacacagctatcaccaaaggaggaggagatgttcagaaatatggttaggagatttaataccattgtgaaagcagcacaggaaatggatgttaggataatggttgatgcagaacaaacttacttccaaccagcaattacccgaattactctggaatatatgagaaagtacaacaaacaaaaagcgatagtatttaatacttaccaatgttatttgaaaaatgcttttgatgaagtttcgactgatttggaacaagcaaaacgtcaagacttctattttggagctaaactcgttcggggagcatatctcgaacaggaacgagccagggcagccgcgatgggctatcctgacccaaccaatccagattacgaagctacgtctgagatgtatcataaaactctttcagaatgtttgaggaggataaaggccttcaaacaaaaaggagaagacaagaaaattgctataatggtagcttctcacaatgaagataccgtgcgatttgctattaaaaaaatggaggaatttgggatagaacccaaagataaagtgatatgttttggacaattgtttgctatgtgtgattatattactttcccattaggtcaatctggatattcatcttataaatacatcccctatggacctgtaaaagaagtattaccgtatttatctcgaagagctcacgaaaataaaggagtattaaagaaaattaagaaagaaaagaaattacttgcaagcgaaattttcaggcgcttatctagaggtcaattatggtatacacctaaaggaaattatgttcccgtataaacactagatctcaaacacagcaaccataaaaccactgtgcaggttttacctagttttgcgacttacctacccgttttgtagataactagttggcagacaaataaaactaacgtcgttacagaaaaatctgcgtgacaaattccaaaaatttaacatcaattggcctaaatatacataaaataagcagtccctatatttttacaaacatgtaaatataaagcaaataaaggtcatttttaatactgtctgataacggaaagaaaagactgtgtttgataatattttgaaatgtcattgccttaaaatatataacgaaggaatgttttaagtcatgaattcaaatcaaaacattttactaaaacagatcattgataaatgatctgtttttagggtatcttatgattgcatattgaagcgaacctcgtttgttgatttgctgatttttatttctaaatcgaatttatagttatagaaataaaaataattttagtttatatcttattgttaacatattttttaggattgtgatttttgtgtttactgatgattattacagagaaaggacttaaacgtcgcacatgtttttaactgcgttaattatttgtttacatgtatatttaccgttgtgaagtaggtatttttttattttgactaatgcaaaaaacacatttcagtatagatgcgtgttggtaacattactgttaattacttcttaaagttaaaatttgatttggtttccagtaacaggacttaaagaggtaccaacaaggtatgaaaaaaagcaaaagtaaattattaaaccttttacatgccactatacgtgtagtccagtcgggttagacgaataactgacctaaccttgcatgccgagctgtcccagatttggtttttctgatctttgggggaggccagtagtggtgtgaatttggaatctcgactgaatgccgccgttgcgttggctcttattttgatttcg

SEQ ID NO: 175 - DNA, 3120 bp, Diabrotica virgifera
atgaatgatccctcaaagaaagtaaaaaatccgttgtttaacatatcggtaactggaggaacctttgaagattttactcaacatgctatattattacccgcaaaagaaaaacaaccacctcatacactaaatatatcccatgaacaaattttaaatgatataatctccggatcttcaaaatcaagtgaagttgtttctaatcaagagatagaaacagttgtggaaaatcaacagcatcttcccgaaggaattaatcagtcagaatttacttattcacaacaactgccagatctgtcaactttgcaacctcacttaagtgctgccccgcaacacagttcgcacttgtcttcggtattttcatctttttctagtatcttgaatattggaggttctaataataatcctaaagaagaagtgatagtatctccacctgcaggaatagaaagtctgattagccaaagtaacaacaaccctgagccagtgccgcttttttcggccagtttacctgaatatagtatccaacagcctcctccgcctacaggtccaacaaatttattcagaagagctggtctaaaaaaaccggcttatgcacaagtaccaggtttatcttcagcccccatagcaccccaaaatttgaatgtccaaaatattcctccaccaaaccttcccccattacctccagcagcgccagtaccatcagcagcatcacaaaacatattagtaccaacagccccttctccatccacttccatttcatcaacttctagtgtagaccatataaaccaaggattaccaaatcagtttaaaccaatatctccgcctccttctaatttgcaatccttccatcctatcacccaacctgtagctcctgtgccggtacaaccttttgcccaatctgtagcgataacgcatccatacagaaatatagtaggcccagttatggatgccataccagctagcgaactatcacaaaatgctaatttcagtagttccctcgtgaattctccagagtctctgccaaaaaataataacacaggtgatgctagtccccctgttaaccaagtgtatagacctgtctaccatcactggtttcatcagagagaaatagagggaaggaaattatgggaaccgttttctatgttggattcattagctttagaacaagctttcacttcaaatgatttagatccagataaagttattgctactgacggcggtcgttatgatgtgaatattttaagaagacaaaggaatcctgtgtattggaaaacgaatcccaatgaagtacgaagatgttcttggttccacaaagccagttcagacggaaggttggtcccatatgaagaaaatatcgctacaaagttagaagaagaatacaaatctgcgtttgaatctaataagtggcacaaaacaatcgaattacctcaaggagaaagtattgtctttcatggacctgatgttttagtacttttctctcccacgcaggttcctgacgcatggggcaacacaacaaaccagtcccgaccgagagttgtaaaaaggggtatggatgaatttgatatagatgaaggagaacctgctcaagtcgatcacatcttgttcatggtacatgggattggttcagtctgtgatttaaaatttagaacagtagaggaggtagttgatgaattccgcagtattgcctttcagttagttcagtctcactacagatcgtcctgtgaccaaggaacagtcaaccgtgtggaaattttacctataagttggcacgataggctacattctgaagaaactggaatcgatgatcaattaaaaagtattactctggagagtatacctagactgagaggctttacaaatgacactttgctcgatattttgttttatactagtcccatttactagtcaaaaaattactacaactgtgggaacagagcttaatagaatatatgacctttttaaacaaagaaatcctgattttaaagggggtgtttcacttggtggtcacagtttaggcagccttatactcttcgacctcttgtgccaccagcactctaaacctgaatctgacggagaagaaagtgatgaaattctttctagtagtccaggctcggtcaaaccagctccacctcagcgaaagatgagtaaaagaataagctatatgatgggtgctatcggtacgggacagccggaaatacactacactcgacttaatttcgaaccaaagaatttctttgctttgggatctccaataggtatgttcgtgatcgttagaggtctggacacattaggtgaacacttttcgttacccacttgtccagcgttcttcaacatttttcatccatacgatccaatagcatacaggatagaatctttaatcaaaccagaatttgcaaagttaaaaccagtattgattccccaccataaaggaaggaaacgaatgcatttagagttaaaagaaacgatgacacgtgttggagctgatttaaagcagaaagtaatcgattctatgagaagtacttggaattccgtttaccaattggcaatgtttcacaaacagtcgccccctagtttggaagaagaggtgtctaaggcatttaaagatcaaatggggcaactggaaaacgagtccatcccagaatctacgggaactcctgtagggaatttgaatagtggaagaagagttgattatgtcctgcaggaagcaccttttgagttcttcaatgagtacgtgtttgccttaacgagtcatgtttgttattggcaatcggaggacaccatattgatgatgttaaaggaaatttatacttctatgggagtaacttctgacagtcaaattcctcagcaaaccatgacaatagagagaccaccatcatctcctacagcaacaaggtccccaaatgttcaaattcgtgcattccaacaacctattggagttgatccaacaaagcccatgcaattgaactcgtctcttgaaccaccaccagtaagtggctttgttcgaaaaacatagtatatgctctacgagtggttgtacaagccacttgccgaacgttatgctccatatttgttgcacagtaacaccaactctaaaattacaaaaaaaaaaaaaaaaaatgcgag

SEQ ID NO: 176 - DNA, 275 bp, Diabrotica virgifera
tgctcaaatttctcacccacaaattaagaactcattctataaatgaggataactatgcagggaaggccgatgaagaccatgattctggtacggaatcagatgaagagattgatgctccagtatcaggatcagcatcctgttcagaacgcgtttgtaacgtatcaccggcagacacaggatgttcgatggaaagtccagctcctgatcaacacgatgctcacagctccgaagaagagttggaagttatcaatagcaatagtaaaatgaggcgatca

SEQ ID NO: 177 - DNA, 274 bp, Diabrotica virgifera
tgattcctttatcttttgtaaataaaaattctggccaaattatattagcaggtgatcctatgcagctagggcctgttatattatctaaagttgctaccgaatgtggactagcagagtcttatttggaacgaattatgagcagatttccatattgtcgtgatccagaaggatttccagaaacgtctggatttgatccaagatttgtaacgaaattattatataattacagagcccttccggacattcttactttgtacagtacactcttttatca

SEQ ID NO: 178 - DNA, 275 bp, Diabrotica virgifera
tggcctccatgccgagcaagactcccgtcagcgtcctccaggagttgctgagccgtcgcggcatcactcccaaatacgaactggtccaaatcgagggcgccatccacgagccaatcttccgctaccgcgtgttccttaacaacgatctggtggccaccggaaccggaagatcgaagaaagacgccaaacattcggcagccaagaacttgctggatctcttggtcggaaaagtgactcccgaacaagccaatcagaccaacggaacgcccggagcg

SEQ ID NO: 179 - DNA, 273 bp, Diabrotica virgifera
tgaactccagtgaatccttaaaattagcaaaatatgaactatttccactgagcgatgtacaactcggttggaataactgtgattggtctgttggtgctggaatggttaatatgggaaatacatgttatttaaactctactctgcaagctctctttcatgtaccagcttttgttaattggttgatgtcagacaaagatcatactgccatctgtcaagattcaggaggtctctgtataatctgcgcgatgcgcaaaactctccaagactcacaac

SEQ ID NO: 180 - DNA, 273 bp, Diabrotica virgifera
tgggtccacatggagatgtaccacaacaacctaaatcggcaaacgggcaacaaaggggtggaccacaacaacagcgtaggcctcaggataggcagcagacagcttctgttaaagaattgacatctcgtatgagtgaactgcaagctggtccacttgtacctatgaggttaagaaaccctgaacctggaaaagcaggtcgcaaaatacccgtagaaacgaatcatctcagcctcgcgctaggtaaattaaacacggcttatcactatgatgttg

SEQ ID NO: 181 - DNA, 272 bp, Diabrotica virgifera
tgagcgagaaggaagttaatgctaagatcgaggagttattgagtgacatgaacctcaacgacgacaaaaagaaaccccttagagaaatgcccatggaacagaaacgtgcaatgttgaagatgcagaacaaaaagaaaggacaacacgacacgggcagtcgattcaacgatcccgaagattattacagatatctggatcaacacataaatccggagtacttgcagttgaacaaatgcctgaactgtgtggaaagcttgagggtagccttgact

SEQ ID NO: 182 - DNA, 275 bp, Diabrotica virgifera
tgctgttttctaatgagatctgggcggctacaaaacggcaggcattgaaaaggacgaattcctgccaggatagaattgaaaggatccctcctagctcggaagaacttttcgaaaatatcccttggatgaatatcatggctgatctgactgttaaatctgctatagctgaatatgagtttaaacgtatgctgaataaggagctgtctcatttctccgaatctagcaaatctggcaatcaaatatcggaatatatctgctccactttcctagacaaa

SEQ ID NO: 183 - DNA, 275 bp, Diabrotica virgifera
tgacagtggggcgattggaaaaaacgtttacagcattgccaacaatttatagtaagaattgtgtttgttttgatggcatctacaccaacgaccaaccaatgcaccgccagactgagagttttgtttacgctgacgacctcggtatcgccgtaaaagagaaaacacatacacaagtaaagtcgacaatggaagaggctttaaacgtgatgtcaacttactacaaacaaaactcattaaagctaaaccctactaaaacccaagtatgtgcattccat

SEQ ID NO: 184 - DNA, 275 bp, Diabrotica virgifera
tgtttagcacacaattaggaaattttccatttgctaatactaggaacagccaagagacaacttccaacagtttgaataatcatataatggatgccaacaatggagctggagatagtaatgatggttccatagataaaaccaaactaattattaattacataccacaatatgccactgaaggtgaactaactcaaatattttcaaccgttggaaaactggaagatgtaaaaattatgagagactttaagactggttacagttttggatttggtttt

SEQ ID NO: 185 - DNA, 275 bp, Diabrotica virgifera
tgagagcaagacagtacatgaccgaaattgttggaggtgaaggtaacgttttgtgtcatcacatgaagtatgaagatttggaggcgaaattcgaaaaaattcaagataaagaatccttacgaaaattcttgaagcaagttacatacgataaacaaggtgttctccacttattcccctggtcgggtattattgacgagaaccaagagttgagtgcttccttcagagttccagacttaaaatcaggaaggatgatcaggctattaacacagctatca

SEQ ID NO: 186 - DNA, 275 bp, Diabrotica virgifera
tggatgccataccagctagcgaactatcacaaaatgctaatttcagtagttccctcgtgaattctccagagtctctgccaaaaaataataacacaggtgatgctagtccccctgttaaccaagtgtatagacctgtctaccatcactggtttcatcagagagaaatagagggaaggaaattatgggaaccgttttctatgttggattcattagctttagaacaagctttcacttcaaatgatttagatccagataaagttattgctactgacggc

SEQ ID NO: 187 - DNA, 2593 bp, Diabrotica undecimpunctata
acgattcgtttggtagtacatagagaaatcgtttttagttttataaccttttctgtgttggaatattgaacaaattctaatgattcgtaaagtaacacttctgctaaaaaccaaaactgatagtttttttcaaaaaaagtacaatttttctgggcttgctactgaaataatgtgccatactctaattgtggaaaaaattgtaggtatatgttgaaagttaacaaataactaatgcttacaataatgtcgacatcaagtcaaaataatggtaaaaagagttcagccagctctattgttaacaccccttccagcactcccattactaatcttgcaaatggtagtagtacccaaggaacagcacatagttcacctccacctaatagcaatgctccaaagtatggtaccctagtgcctaacagaatattcgtgggaggaatatcagctaacacaacggaaggagaattaatgcaactttttagcaactatggtactgttaaagctgctaaaattattcaggacagggctggtgtatcgaaaggatatggtttcattacctttgagagtgaggatgatgctaaaagacctcttagagaagctgaaaacatagtgctaagagaaagaaaacttaatatagcacctgctattaaaaaacagccttttagtcgagcatttgatgcatccagtccacctgctgttgctgcaaataatgccagtcaattcttttttcctccgggtgctgccgtgccatattttcagagtggagttacatattatactcagccagcccctgctgcacctggagatcccactcctcaacaacctgtttatcaacctcctccaatgtatcccacacaaactggtcctccacagccagctacatacccttctatgatgtttcccgctcaaactatatatatgccacaacagtatcccatgcctattccgtacgagtacaacttctaccagggtaacggcccatcgctgccaactcagtatctggccggaggccaaagtggttcgggaagctctcattgcacctcattaccatcatcaaacagtccacccagacccaatggttatggtcaacaggtacctacctataattcaggagatcccgtctactacaacttaccaatctacggagctactttggaaggtccgccattatacgctgatgccttcgatctaagcgctagtggaacttatgcggaggaaacctacagcagcatgattacaactcttactcaagaaaatgtagaagcttctcttggatcatcgataaattcaactcatgcagcttccgacaatttcacacaacatctggatcaatctctcgttgagtctgattcaagtattgtgaatgttggaggtaaaccaccactacataaatcctcagagacaattgtttctgctctttcccaacctcaggaggatagaaactcacatacgcctattgtttcactactttccatagatcatcaacaagaaaaagactattcatcaatgcagagcggtcgtagacgtaaaattctggttcaaagcaatcaaaataacgtgcccatgtatcctacaaatggatacgtcaaccagttcgtcggatataatcctcaacaaccacccccacattcattcggtcaacctctctttaacaacggttacggtttttcggaatatcgtcgatttaacggatacccagatatcaggtcaattaataatagtaataaaccgaggagacgaatatacgaaaataggcggtcgaacgatcattctagccgttctagtcttcgcacagactcaaactcatcggcaagttgtgtcgacgaaaataaaaatgaagaaaaaacttttcgaactactgttaacactcctccacctgccccatactcacctatgactaatcaacaattcaaatttattaattacagtaacacgaaaaacatttataatcataagtacgctaataacaataattattataatagaactgctacacaccatgaccgatttaaacataccgaacctctagcgaataaaaacaattacagttccatttatcccttaacaaataatttcctaactaatagccatacccaaagtaattctgattcccttccctcccaaaattcccaggtacatgtgacgactacgggtcagagcttcgtcccggtgactatccaagctcagacgaaacgcaacaagcgttctttgagacggagcggtgccagtgctggaggcatcaacgaaatcggcgccggtgacgcccctttaccaggcgaagaatgcgaagacgtctacaagaagctggagacgcttaagttgtaacgaaaaagtggtatattttcttgtatatttttttctatttatttaagactgtacaataatgtaaaatactagaaatttaatgtaaactaaagaggaaaaatatataatacatatttattaaagatgatggagatgtaacaagtttttatttattaaaaacttatttttattcgttgttaacaaatgggagctgatttcttcaattataacgtgttggtatcttgtaattgaaaaacgtcaattatagtacatattatcgtacaattattag

SEQ ID NO: 188 - DNA, 2585 bp, Leptinotarsa decemlineata
gccgttgaacagtagtgaaaatgtttagtttttggatgatttgtgtattgagttaacaagaatattctaataatacaagaatttatgagaacgtctttcgatacatctaacggggctttacttaatcactagtgaaaccagacagttcaatttttcccggaaaacaatagaaatgtgttctaacctaattgttgtatggaaaaaattgtaggtatctcctgaaagtgaacgaataaggaaaagctgaaaaatgtcgacgtcaagtcaaaataacggaagaaagagttcaaacagctctattgtcaacacaccctccagtacgcccctcacaaatgctgctaatggaaattcgcaagttagcacacaaagttctccaccacctaataacaatgctcctaaatatgggactctagttccaaaccgaatatttgttggtggaattacggccaataccaccgaaggtgatttaatgcagctcttcagtagctatggaactgtaaaggcagcaaaaataatacaggatagagctggcgtttcaaagggatatggttttataacgtttgaaagtgaagatgacgccaagagaccattaaaggaagctgataacattgttttcaaagaaaggaagttgaacatagcaccagctatcaaaaaacagccattcagtcgggcatttgatgcatccagtccaccaaatgtagcagctggaaaccctgcacatttttttttcccacccggagctgcgatgccatattttcaagggggtgttgcctattatccacaacctccacctgctgctcctggagacccaaatgcccagcaacaagtttaccaacctcccactgtgtaccccactcaggcaggccctcctcaaacggccacctatccttctatgatgttccccgcacagccaatttacatgccgcaacagtatcctatgcccataccgtatgactacaacttctaccagacaaatggagctccgccctccgcacagtatattgttggaggccagggtggccccggaggaccacaatgtggcccaatcgcgccttccaatagtcccccaaggccaccttgttatagccaacagatgccagcctataatccagcagatcccatgttctacaacatacccgtctatggtcccacaatggagggaccacctgtttacaccgaggccttcgacttgggaaatggtggaccatacgcagaggacacctacaacatgggtgataacaacattacacaacaaggcatagagacttcaatcccgcctcctgtctcagtacctgctgtacaaacactcacttttcctactcataacatcaatgttcctcctcctcctattcctacaagcattgagttgaatgtccccaatgcctcttctcggcaccagatggatcctgttgttgcagaagatgtgtctacacctaggaattcagacacacctgtagtttctatcctttctatcaacgaacagcaagaaaaagactattcatcaatgcagggtggtcgaagggttaaaattcccccgccaaacctgcataacaactttcaaattcagcacgctcaacatccaaatggttacattaaccatttttctggttacaacggtccaccaccgactcagtttggaatgtacaatggttattctcagaatggtcccattttcccggactatcgtcgagtgaatgggtttgacaaccgtatcaacaaaaatagaaggcgttcatatgacaatcgaaaatccaacgatcactcaagccgttccagtatacgcactgattccaactcctcggcgagttgcgttgatgaaaacaaaaatgaagacaaatctcacacgcgcacttctgtcaacacgccacctcctgccccttattcaccgatgacccatcaatttaaaactattgcaaacagcaacacaaggaaccaccaaaattccttcagatattataataataataattattacaaaccagcatatttagaccgatcaaaaacaaatgacttgaccactcataataaacccagcaacaactcctctagtaataacagcaccttttcttgcccaaactccccacaatcctccatttcccaggtgcatatgtcggcaactcagaccttcgtaccgcaagctaggcgcaataagagatctgttagacgtagcggcaccggcggattgaacgaaattggcgctggcgacgccccccttcccactgaagtcggcggtgaggtgtgcaagaaattggagacgctcaagttgtagtaggtgggagaaagtcattattatgtatatttttttctatttatttaagactgtacaataactgtaacatattataaatttaatgtagaaacatattataaatttaatgtagacctatgagagggatattaatataatatatatttattgaaaaatgtgtagatgtgacgatttgattttgagaaaggattttttttggtggtacagatgacttggaaacgtcttgtcagatatcttaatgtgtcatttctatccatgataaataattgatgacttttcatattgtgaactttgttcaagacgcgtttcactgtgc

SEQ ID NO: 189 - DNA, 2154 bp, Phyllotreta cruciferae
gtacgatccgttttcgtaggaactagtgaaattggtttttagtttttcgtccttaatagtgttgaatttttgaatgcattctaatgattcgtaaactaacgctgcatttaaacgacgtatattttgaaagcgaacgaataacgaatgccctcaaaaatgtcgacctcaagtcaaaataatggtaaaaagagttcgaacagctctattgtcaacacaccatccagcactcctgtcacgaatatcgccaacggtaccacccaagtgagcacgcagagctcgccgccgcccaacaacaatgctcccaaatatggtactttggtgccgaacaggatcttcgtgggcggcatatcggccaacacgaccgaaggcgagctgatgcaattgttcagcgcctacggcacggtgaaggcggccaagataatccaggacagggcgggcgtatcgaagggctacggtttcatcacgttcgagagcgaggacgacgcgaagcgacccctacgggaggccgagaacatcgtgttgcgcgagcggaagctcaacatcgccccggccatcaagaaacagccgttcagcagagcctttgacgcgtccagtccgccgacggtggcggcgggcaatcccacgcagttcttcttcccgccgggagcggcggtgccgtacttccagggaggcgtagcttactatccccagccggctccggccgcccccggggacccgtcgacgcaacagccggtgtatcaacctcctccaatgtacccgactcaaacaggcccaccgcaaacggccgcctactcgcccatgatgttcccacaaactatttatatgccgcaacagtatccgatgcccatgccgtacgattacaacttctaccagggcaacggagcctcgccctctgcccaatacatggcgggagcggcgcaaagcggatcggcggcgggaccgccgcaatgctcgacgatgccgccttcgaatagtccgcccagaccgccttgttacggccaacagatgcctgcctacaatccgggggatcctatgtttgcttataatttgcctatatacggttcaacgttggaaagcttgccaatctacactgaagcttttgatctcggcgcgagcggttcatacgctgaggaaacaatctacaacaatttggatcgaacggtaaccccgtcgcacgacgacgacccgaccaacatacagacggtttcctactgcaacacgacaaacaacacgaacggcggcaccgccgcccccgacccagcacaacaacaacaccccgcgttcgtcaaagacgagagaaacaacgcgcgcacgcccgtcgtttctctcctctcgatcgaccaccaacaggagaaggactactcgtcgatgcagagcggccgccgccgcaaaccgccacccccgccgcagccacagccgccgccgccgcagctacacaaccaccacaacaacccgacctatcaccaccaccatcacggcgcgttcgtctcgcattcgcatccgttcgtcggcttcaatccgcaacagccgcctccgttgccgccgccgcccgccaacggctacgcgccgccaccgcaggctatttacaacgactatcacaggcgcgttaacggttgttttgttagtaatagcgtgaagaatgtaaataataacggtaaaaatcgcaacgaggacggtaagagtaccgtacgaacggcggtgaatacgccgcctcccgccccttactcgccgatggcgaatcaccaattcaaagtttacacgaacagtagcgttaagaattttatgaacaataataacagcaacaagaacaataattacgctagaagcaacaaaaagtacgctgtaatgggcgtgccgcctccaccgccgccaccgcccgcctctaacgcatccactacgaccccaacaacatccaccaacgacaaaatctactgtaacaacaacaataataacataactagtagtagtagtagtaatagcgccgccttgcctacgcctgcttcctataattcgaatactaataataataatagtagccgcctccttcactataataataaccattccccttcgattaaccacgtggatttgggggtgacgcaggtgcacctgtcgacgacgacgtcgcagagcttcgggccgcagacggcgcgg

SEQ ID NO: 190 - DNA, 2036 bp, Phyllotreta striolata
ttgaaattgtttttgaacttttgctgttttgtattcgttctattttcattttaaacggtttaaaatgcttctctgagtattttaaaataagcaactaaaaacaaattcgaatttttaacaattttggaatcgactaaacgtaaggtatattttgaaagcgaacgaataacgaatgccctcaaaaatgtcgacctccagtcaaaataatggtaaaaagagttcgaacagctccattgtcaacacaccatccagcactcctgtcacgattgtcgccaatggtactacccaagtgaatacgcagagctctccgccgcccaacaacaacgctcccaaatatggtactttggtgccgaacaggatctttgtgggcggcatttcggccaatacgaccgaaggtgagctgatgcaattgttcagcgcctacggtacggtgaaggcggccaagataatccaagacagggcgggcgtatcgaagggctacggtttcataacgttcgagagcgaggacgacgcgaagcggccgctgcgcgaggccgagaacatcgtgttgcgcgaacgcaagctcaacatcgcaccggccatcaaaaaacagccgtttagcaggaccttcgacgcgtccagcccgccgacggtggcggccggtaatccgacgcagttctacttcccgccgggggcggcggtgccgtacttccagggaggcgtcgcttactatccgcaaccggcccaggccgcgcccggggacccgtccacgcaacaaccggtctatcaaccgcctccgatgtacccgacgcagacggggccgcctcaaacggccgcctacacgcccatgatgttcccgcagatttatatgccgcaacagtatccgatgcccatgccgtacgattacaacttctatcagggcaacggagcctcgccctctgcccaatacatggcgggagcggcgcaaagcggatcggcggcgggaccgccgcaatgctcgacgatgcccccatcgaatagtccgccgagaccgccttgttacggccaacagatgcctgcctacaatccgggggatcctatgttctataatttgcctatatacggatctacgttggaaagtttgcctatctacactgaagctttcgatctcggcgctggtggttcgtacgcggaggaaacaatctacaacagtttggatcgaacggtaacgccgtcgcacgacgacgaatcgaccaatttgcagacggtttcctactgcaatacgacaaacaacaacaacaacaacacaaacggcggcgccgccaccgccgaacaacacgcgtcgtacgtcaaggaggagaggaacaacgcgcgcacgcccgtcgtttctcttctctcgatcgaccaccaacaggagaaggactattcgtcgatgcagagcggccgccggcgcaaaccgccgccgccgcaaccgccgccgcctccgccgccgcaattacacaacaacacgaccgcctatcatcatcaccatcacggcttcctgccgcattcgcatccgttcgtcggtttcaatccgcaacaaccgccgccgttgccgccgtcgaacggctacgcgccgccgcaaccgccgccgccgcctatctttaacgattaccatcggcgcgtcaacgtcaacggttgcttcgtcagcaacaacaacaatcacattagcggcggcaagattgttaacaacgcgaaaaatcatcgcaacgacgatggtaaaagtaccgtacgaacggcggtgaatacgccgccgcccgccccctactcacccatgacgaatcaccaatttaaagtttacacgaacagtaacgttaaaaactttatgaacaataacaacaatagcaaacagaacaataactacgctagaagcaacaaaaaatacggatcggtgggtgttcctacgccgccacctcccgtttctaacaccgcctcgtccaccaccaccaccaccaccgccgccacctccacatccacatccacatttgtaaccaacgacaaaacctattgcaataacaacaacaatagtactagtagta

SEQ ID NO: 191 - DNA, 4893 bp, Vibidia duodecimguttata
gtcgtcgccattttcgatggttccgttttgtagtgcaaacttcgttagtttttgatagttttgtgtgttattttatcaaaattcactaatgaatcttattaaactatcgctaaaatcctttgaagtgttcctttgcaggtagtactcgagagtggaagagaaatttaaagcttctaaagatgtcgatacctaatcagcctaacggtagaaagagttccaatagttctgtcgcaaacactcctgccagcacccccgtagcgaattcgaatgggtctgtccaaacggtcgtgcacaactcgcctccacccgccaacaacgctccgaaatatggtaccctggtgccgaacagaatattcgtaggcggcatatcggccaacacgaccgagggcgagctgctgcagctcttcagctcctacggcacggtaaaggcggccaagataatacaggacagggccggcgtgtcgaaaggctacggtttcatcaccttcgagagcgaagacgacgcccagcgcccgctcagggaggccgataacatcgtgttgagggagcgcaaattgaacatagcgccggccgttaagaagcaaataccttccccgcagcccttcagtttcaacagagccttcgacggttcgggatcgacgacagtggcggtcggtagtccccagtacttcctgcccccgacgatgccttatttccagggcggcgtgagttactacccaccgcccccgaacggtccggtgcccggcgatccgaacgcccagcagccggtctaccagcctccagccgtttattcggcacaggccggcccgccgcagcccgccagttatccctcgatgatgttccccgcgcagccgatctacgtgccgcagcagtatccgatggccttgccgtatgaattcagctattatccgaacgccggagcccccccggcacagtacgtggtcggtacccaaggcggtcctccgccgccgcagccaccaccaccaccatcagcacaaggtcccccgctgcctccgtccggtagtccccctcgtccgccaccctgctacaaccaacagttgcccttcggcgccgagcccattttctacaacgtgcccatgtacggcggacccatggatcatccgcccgtctacgccgaacccctcgaaggcgcaccatctaattacgccgaggaacaattcacaatcgtgcctcgagccggcgcatacgaggtagacgccatgtacaacggccgtcccggctccggctttaacgaatcgacacccgatccatctttatcgcacaacgtgccgccgtgtcggtacagcaacaatacgacgccttacgctgatcaacagcaacagcagcagctgcaacaacaacaacagagggattcggaggcggacaacctaagacagtcgaacacaccggtcgtttcgttgttgtccatcgagagcaccatggagaaggacgtgaatgccatgcagtgcggaaggaggaggagaacgtatgcctcctgcagtcccggtccgtttttcgggccgctaatgggcggcatgccgcccatcatgttcccgcctccgaattatcccccgccccccatcaactatcatccgcacgttcccttcccgcaatttcccaaccatcggccgttcaacggttacgatagcgctcggccgaagctctacaacgccaacggctactcgaagaagcagcagaagaaattcaacaataattatagaccggtggacaactcgaacaggtcgagcctgaggacggagtccagttcatcggccgccagctacgcggaagacgcacgccacgcccaccagcatcgcaccaatgtgacatcgcccccgcccgccccctattcgccgctaacgaaccacggtttcacgtcgccgatcaacggcatctcgaatccgcccaacgttccgtacaacaacgttcctcatccgcgacctagaaactattacaacaacaataataataataacaaccacgcgcatcacgataagaaaagaaataataacaataaatctcgaacgtcgaatggtaacggttaccacaataataagaacaataatcaaaggggcgagaccagcccagtgaatcagactcatgacacgaatacatcgcaggtccataacggcgggagcgcaaccggcttcgcggcccccctgcccagtcgcaggaacaggaagaacgtgcgcagaagcaacgtcgcggccacagtggcagcagcagcagccggcgccgccttgagcgagatcggcgccggagacgcgccccagcagtcgcaagaaccggtgtcggaagcctgcaagaaattggacagcctcaagttgtagaaaggtaaaaaggggatgcgtgtgttaatttttttttcttctttttaatcgatgccatcgccattgacatgaaaaaaccacaacaaacgattatcttcgaataagactgtaaattttatatataacaagaaattacttgatattacgtaagaaagggaaatattaaatatttattgtaaattcaaagtattattttttttgttttgtatattttaaattattatttagaaaaaaaatgaagcaagttgttcaccgtaggacatcactttgtatataacgataataatgatgcaaaaacgaaaaaaatctctagctatggtatatgcaatatttatttagagtataaacgacaatattaattgtatatgtaatacaaaaattaaacgagatgccatattggactagatattaaaatgaaatcggtaacgtgctgaaaaaaaaagtagactcgcgtttctcggtttagatcgaaatcgtgccgcgccgcatcagacaaaaattgttatttaatatctaaggatcgtgcgtcgctctgttttcgttttctttttgtttctttttttttttacttcaaacgcgtcgggtcctcttgcgctcatttcgtatacaattatgttttgacgtttctcgacgttagcaatttctcaatgaaaaaaaaaagatctctgaagcgaccagttgtcaattctactcggtgattaaaaaaaaaattaaatttaaaacgaaaaaaattcggttcgtctagacgaaaggagaagttgtgtgcgaaacaccgttctgccttattttcctcttctctcggtggttagattaggttttgatagaaaatattcgttttgtttattttttttttgtaattgaattttttcacggtagtttgacttgtatatgcataacaaaaaggtgccgtgatctgctccatcgcgtttttaacctcaaacgtcatatcttctgtcaaaacctccgtctacgccgtcttgcgaattatcgaaatttttcttgtcaagtcttattcgaatctcccccctcggacggaacaatggagcatcgtccgctttttgttgtgcgtacttaacgagattttgctcaaaacggctgccatcgtctttcgtacgttgttttattgagggtgcgcgatcgagggactcgcgacatccacccgatacgaggagggtagttttttttctttgttccctcgattttccgagccgtctgcaagtttccatcatcgaacgtcgatgagttctctctttctctctctctcccccctccagttaccggtacgttcgaagttttgtgtcattttgaattttaggctgtgacataaagttatttattgttgaatttggtagattttttaaggaagagaatctgtgttttttgtagctatttattcgataagtttcgacgaaatcggttgatctcttggaacccgactcggctttgcaaattttttccgttttgacaatcgtcgttgcgcggcctcaccttgacgactcgacgtcgcgggttccaagactgcgcgcaggctcgaaacgtttttaggatcatccggggctcgtttggattatttttcgtagatttttttttcgcgctcgaacgccgagatatttcgtagatggacgaattcgccccccccaaacccccttcgaacccccccaaaaattcgatgcgccagtcggatcggatgtttcaaatggccctaagcgatcgagaaatacaaaaaattgatgtgaaattttggtttccccaaagaaatatgtaaactttaggctcatcaattgatatttatccaaattagatgtgtaagttagtattagtaacttagttgtagttttaggataaatgaactatctcttattcaaatagatgataagacggcaattgtctccgttcatcattaaaacatacaggattttgctcaaagaacttttttcgttttcttcttaaaaatgtgataaaaaaaaacgtgaggcaacgagaggttcttgtttttttctctctatctctctcgttcgtagggaaatgcttcctcatgttgcaaagatttcactgagctgtgtaaatacgttcattttgttatattgttccatttttttctctccaaaatcaaagggcagggtcggttgttgttgctgttgaaattccttaattttttcttcaactccctcgaaatcttcaatctgacgaaaatttattgaaaaatatgatatttccacgtttccattgaatttatcgatgtggtattaatttacttctttcttttttcgagattattgtgtgaaaattaaattttctttctatgatgtgtggagttgaagaaaaacggtcttttgtcatctaaccgatttgtgtgaatttcgtgtccggccctacgtccatttttttccaagaatatctcaagatttttcgcagcagtacggtcttcaaaccttgaacccttcattttcctctctccccaaaccctcgcctcgattctctttctctcacacacacacacacattgaaccgatttgaaatagtacctgcaaaatattttgtaaatattctgtttgtaaattac

SEQ ID NO: 192 - DNA, 2051 bp, Orius insidiosus
tttttttatgttactttgtcctttaatatcatactcttaaaaatcaaataatcctttaaatgtcttaattcgtctattattttttctttcccaccattttctttatcataaatttttttttggaatccatccgaaaggtgaacccaacgcccgccattgttcgcactacccccatttttcgggccgacttataaaattccgtcagaaaatattaattttgtcaaaaaacgagaatctatttagaacatgagaaactcttttcctttcggaactcgcgttatactttaaaaaatttaaatatcaaataaggatggcggttcaaaccaacagagggatgacgagcgaaaatgaaatgaaagatcaagacgtggcgccggtctttaacatcaacgcacccaaatatggaacagtcgtgccaaacagagtttttgtcggtggcataacatctgcgacgactgaagacgatctcaatcagcttttctccaactacgggaaagtggtcaacgcgaaaataatcgtcgaccgtgccggcgtctctcgaggttacggcttcgtcacgtttgaatccgacgaagaagcaaggcgccttcagaaagatgctgataacattgtacttaaagaacgaaaactaaatatcgctcctgccattaagaaagtccagcctgtctacacaagaggttatgacccttcaagcggacctggaagcccttctcaatattcaagctacattcaaagacaaaacggagtcgtcagctcatactacatgaacagtctaacgtactttcctcaacaggcagcccaacaatctgcaccttcgatgaccccgttaccttccaaccatgtagaaccttccgtttatcccggaaattacccagcgatgcctcagtgtaattcgcctccaagttatcaatatggatatcctcagcaagcgccgatcttcattcctcattatccgtttgctatccctcagtatgatgggtgttatcaaggagaggtacaaaactgttatgctcaacctggaatggaatctaataatcaggtcgcgtatccgcaatattttgtatcgcagcaacacccagaaataacgtattatcaacagccggtacctcaggagttggtttatacacaaagaacttatgattcgtcgactgtatattttactgagcctaagtttgacgattcgtgtgaaccatcaccgacatcgccaaatcaacaatcacctgggccaccaatgttaccacctgcaccctcgttgccgccgatttccgaaatcgataagccaaaagcgagaaacgacgaaacgccagtcgtttcgctttcgaaagtataccacgaccaaaacgacgactaccagcccaatccgagatataaaccccatcaaggtttcaaacggaaacctcccccgaggcacgaaaacaacaacaacaatccggatcttacggataaaaataggatgaatcgatatgataaaagtaggaacgttggtcaaaaacctgtccgtcctatggcttcgcagaatcgtagacccatccacaatccacgtcccaccaacctctttcaatatcgtaatcaatctatgcaggtaccgcagtttccttcatactacgcctcaaggccatatgtgaaccaatcgcagacttactacaaccagcgaaaaccatttcaacgcggcaaattcagtgcaaaggcgaaaaaatacagagacgagacagaacctgaaggtgcagaagatgaagacgtctgcgaaatcgatcagttaactcctcccataacacccatttcgccgaaacaacatgacatatcagaatccgatcgtaaagacgaattaatccgatcttttgaaaacttgaaaatgtaaaaagcttattttgaacttcaaaattttctaaaaatataaaaagtgtcgaattcgggtcacattaaaaatttttgatatatttgtaaatttttttctttttcagaaaaaatgtgccaaaactaaggtttgtgataaataagccataatgtaactttgaggccttaaaattgtttatacctcacttctttttttt

SEQ ID NO: 193 - DNA, 2837 bp, Lygus hesperus
ccgctgttagttgggtggtagttatattttttgggggtgttacctatttcttcccttttgttttactctaagttggtggtaatttggatccgaatttgttttatttggtcgttgaagagagtagtaaacttgtagattagtttttcaaccccagcccccagttttaactccctagtgcagctcgtcgtgctgccgccattctgcttggactgggtttttcgctgatttgcttatctcgtaatatggacgtaatccggtgccacctgatcggaaatagtttctaagaagaacgtgttttgtatcgagctcctgcgttgttaattcaatcaactagtatcatggagaacccttctgaaaaggatggaaaggattcgaatgagtctcaagtgtcttctccggtgagcactgtcatcaatgctcctaaattcgggtacgtcatccccaatcgcgtattcgttggagggatttcgtcgcagacaacggaaaacgatctggcccagcttttttccagctacggaaacgtagttaacactaaaatcatagctgacagggccggtgtctcaaagggatatggttttgtgactttcgaaactgaagaagaagccaaaagactgcaagcagatgctgagtctatagttctccgagagagaagacttaacatcgcccctgctattagaaaacagaactaccaaccgagaacttatgacggcgtccctggaagcccagtttctatctcacctggtcagctttacagacagactggtgtaccgttcttccaaaatggaatggctttttatactgcagctcccgctccccagcctcctcagccaatgacacccgtgcagagtccagtggaagctcctcaagtgtatccacctggtgcttacggtggtgtcccccaaaattcaactgcacaaaacttcactttttcctaccctgctcaaagtcacgtctattacccagcccattacccttatcagcttgctttggaaggataccctgtcactgatgtcaacaatgtgctcatacccgccggaggaggtgctgaaaatggaggggttgtctttgctgcttcaccctacatattcactcaacagcctggaacccaacaaaacgccttttttgatcctcaaaacattgcacaaattgctccgactcaagaacaaatcttctatcctgcatctagaggctacgagacgcctacttttctatacactgaacaaagcgggcgtggaaagaaccccaaaggaaccgggtggtacaaggacagtaacgagtcagtgactgaagaagggaatgtgctggccaacgccctcacccctccgatcacccccagatctccccacgacgcctcggaggacctctccgcgtcccttcaaggtctcaacatttagtcatccagatttcgtgtcatttttaaggcatatcttccctctaaagacttgaatattctaatactaatttcgttctagcacagtatctttttgatagcaaataaaaatgattaaatctctaagtggttgttggtaatacggaagctacgaaatggaaggaacacattgattagctttcccacttcactaaaaaaaatttaaaaaaacctcgggtgccttattcatcttaaaatgactgacccaagtgccatacaaactctttctcatctaaatttcctaacttttgctaaaatttcaattttgatctaggaacgctaggaagctcaacaccaaaagtaaacttgactgccctaattattaactaaaaccaccaatataaagtacaatgacttcctctggatacgacggttaagactcgtcttgccttgtccatttaccatgtaaatttattttcgaataacttgagtatttttctagaacgctttaacagtaataaatcttttataaatatagatttatttctactctaaggatagaattacctttttgtacctgtagacttgttacagttataagtaataataaattttataaaagacaaagtcattgttgaatagttcgtaaaactctttagtaagttttctagttgattgcgttgaagcactttaaaactcgtttttcttaagttattgactctatgtgattttgctcttaagaaatacttaccgacccctttgtgtttttcctctcaaaattctataggcggtctctgtagtttttttcgttaacaatgaacaacctaaaatttgcatgtctctgtcgaggcattccttcgaaaaatctttgaaactcgaagattttttgtttctctttttctcttgatttagttcctactgattcgtgttgtataccctcccttgtgatatttacttataaataagtcggttgtgtacagtattttttgtcattgttacaaactgaaactagtcaatttgactataaaatgttaagtgataaattctcgaatgtgactttgaattaaggtagcactcactatgtctacctaaaagatgatcctctgtagttatctatgaagaactagtagttaagtgattgacgttactgcattttttctatcgtcagacgctatttgtatttttcttttcacacgaaaagaaagaccatttagatgtatttcctacttgttttgattgcatctcgagagattcctctctttgtatcagttctttagaacgtatcaaaacctaaaggctgacatcttctgccaatattggtaatttctcgctatgcttgatagctaaacaaacacttcatgtattcatcctatataacgattttgacaatacgaatttattttggaacagccctcaacttattggttcattgactattttcaataaaagacgtcagattcaaaaaaaa

SEQ ID NO: 194 - DNA, 3780 bp, Megacopta cribraria
ttttgcctgacgttagagtgtgtgttgtgttttttttattttctttagtcgctgttatattttctatttttgcatttattttaattttttttgttctggcacctcttatttaaacaataacctgtatattttattagttgtcagttaattttttttgatctctgtaacgtttagtttaccgtaatactagatattcatttgtctgccgccatattatttaggtcattttttcttaacaagaaataagtgaaaatgaatcttgacaactatttaaacttgaaggtattttagaattttttgatctgaggtgacaaggacaagaacccccttcttctacttgaaagtttttttacaagttagaatttttgagtacaaaaatggtgttggagaacatcaccgaagaaaacaatagtaaagaaagcctggaaacaccgtccaccatccttaatcttaatgccccaaagcatgggactattataccaaatagagtgttcgttggtgggattgctcctgctacaactgaaatggatttaatccatcttttctctagttacgggaatgtaacaggaacaaaaataatttcagatagggcaggagtttctaaaggttacgggtttgtaacatttgaaacagaggatgaagctaaacggcttcaaaaagatgctgaaaacatagttttaggacaaagacgacttaatattgccccagctataaagaaacagggtttcagtcgagggaattttgactgctcgactaatagtcctctcccaccaacacagctatatcgccacaatggttttacctatgcatttcacaacgggatggcattttttcagcagccatcgcctacagtccccacatcacctcatgtggagccttctccagtttttcagactggttcttcatatggtgcagtagcaccgagcagtccagcagggccagcttacccttttccattcgctcctcaaggacaaattttctatcaaacacctcaataccagtaccacctacctcagtttgatggatgttatgatgctggacagatgatggtaacagatgggagtttagtgatcccccagtactatctagcacctcaaccaccaccagaacttgcattttatcctcctacccttcacaatcctgaaacaacagcaccaatacaacaggtgatttatacatcacctcgagcctatgattcatctttaatgtattctacagagccaaagtgcggaatggagagcagcgtaggagctcacagtggcgttagtatggctgtggtcagtaaggaggagggagaaccaccaacatccaaccatcagagacgaccacgtgaatcttccaccccagtggtttccctcctcaagctgtacaaagggaaggatgaccattcaaaaaagaaacagcataacacccatgatgagggaagaagacaatattacctcaataacaataatcctgataccaccaatcggaacctaaaacaccaggaatcctccagacatggaaaccttccctccctaccttcttatcctcctgtacatactagtcctaaccttaagcaccctactgtacaggttccccagtttcccttctactccagacaggtgctcgccccgccagcgaccctagcatccttctatccacccccaattccgcatagcaggcctaggtccaactacaggccaagatatggtggtgggagaggtggaggccgtggaagtggcaataagtggctacccaaagaagaggaaatggggcagcctttgacaccgcccataacccctcgttcggagccctctggtgtcactggagccactactggacctgaagatgtcgtccagtctattcaagctctagcaatctagtcctagacactatttgtcttaaaccataccaaataaggaagagaaccttcgcctgttataataataacaattgaagaaaaaaaaataacaaaaaaaaactgaatagtcatttgtttaagagaatatatatacatttgtttatgtatataaaatgtatatttataaataaatttaaagcataatttgatatttttctctatgatgtttaaaacattggaattttagttcttaaaacacaacacacgataatttgttagattctagtccaggaaggactcatcgagatttgagactgtttgatataatttgtaattattataatgtgacatttcacttgttaacttaaatgcacattatttgataaatagtgccatttatttttactgtatggatgtttgtttaattcttttcacttgcttagactttatcagacttttctacttctgctaaagatgagatcattctaaagatattaaattgaaatgcatcattttatctgaaatatagatcagttttaatcttcatttgtttgtggtaagcttttacataaatgtttaaagttctgttattacaacctcgaaacaaaattctctagatggccaaatcaaaacttttgtacctgttaaacttctttaataagttagtttaatttttataaaagacatggtcttcagataggtaggtgtacttaaaacataagacagagtatccagatttttgaatgcatttctggtctttgtgataatttagtccaaagctgagaatgtagtaattgtataaaatattagtatatatttaaatatatataaaatttaatatattttggttaatatgtatgttatatatttattgtactttaatgtaagtgttaatgttaagtagtttctagatctggttatagttaattttttttgaaatcgctaagatatgtttaaggttgagattagatacaatacaataaacttgcatttattttaccctttaaaaatttattctatattaatatcaaaattgtgctctgttcatcaggatagtttgtaattgttagactgtaagacgacttttgattgattaatcaattgtaaaattttagttgttgctcatattccattattcatattataacttgataataatattttttataggttaaatgttagatattaaggttcattcaattagttacatgtctggtaattgtcttccttaagttttcaattttcagatttgttttttaagttcctacatttttaagaaaccctttagtattcgttgcttaaaagcacaagtatccttaactatggtttcatacctacttctgaaaagataaaattttttttcttttctgtggcttaggtgtaagacaactagtcaaacacaaaatttattcataaaaaaaagaaaaaaaggatttgttaatgtaagattggacaagattttgttataccaataagataaaactgttgagatgagatggactatttgttcatgtattttcgatgtatattataaaagattttgttacatcaaaatgataagtacgatttgagcagttagaagaatagttattttttaaaaatataaatacaacaaaaatcatcagcatagcatatatttataattaaaaccactacttcaggctgtgatttttattgtaatacattgtgttagtaatgatgagtttaatcttaaaaaatgtaagtttatttatgattataacttaattactttccaccagttaagtgtataagttacaagaaaatatttgtaccatattccaaggctgatgataatcgccatactgccatgaaagtgtgttgtacttatagattttttttttatagaaccacttgtattcaatttactatttgaaaataattgccttatattctactaaattctttcagataaaaaa

SEQ ID NO: 195 - DNA, 2816 bp, Euschistus servus
tggatggtggagatggcctggcgttagagtgtgtgttgtgttttttttattttctttagtcgttgttatattttctacttatgcatttatttttatttttgtgtgtccgcgcctcttatttaaactagtttccgtagatttgttaagttgtcacttaatttttttaatgatctctgtaacgcttagttatctgtaataatagatgttcatttgtctgccgccatattatttaggtcattttttcttaaccgaaataagtgaaaatgaattgtaagaactgtttaaacttgaaggtattttagaattttgatctgaggtgtgacacttgtggtgaacatttcttaataatttaaaaggcagaattgagtgaatctcttactgctttataatggctgtacaactaaaaaatcaaaaaaatttagcagctttgagtgaagaaaaggatataaataaagatcacatagagtccgcaacttcaaatataagtaataatttaaatgcaccaaaacatggaactgttattcctaacagagtgtttgtgggtgggattgcacctgccacaactgaattagatttaatccaactattctccagttatggcaatgtcactgggacgaaaataatatctgaccgcgcaggagtttctaaaggatatggttttgttacttttgaaacagaagatgaagccaagcgtctacaaaaggatgctgagaacattgttttaggacaacggaggttaaatatagcgcctgccataaagaaacagagctttggtcgaggcggttatgattgtactgcaggtagcccaatacctcctactcaagtctaccgccacaatggtataacatttacttttcacaacggaatggcattttttccacagccttctcctccagtccctccatcatcacatgtcgagccttcacctgtatttcaatcaggtgcatcctatggagctgtaactcctagcagtcctggacctgcatatccttttccatatgcacctcaagggcagatattttatcaagctccacaatatcaataccatcttcctcaatatgatggatgctatgaaggagggcaggtaatggttactgatgggagcctcgttatccctcagtactatctggcagcagctcctcaaccaacacctgaattgttctatcaaactgctgcaattcatccacaggaggcatctcctcagtctgtgcccccgttattatatgcctcccctcgggcctatgattccggacttgtttactccacagagcctaaatgtggattggagaatggtatgagcaatcataatggcggtggtatggctgtgataaataaggaggagggagaaccaccagtcactaacaaccacaggcgaacacgtgagtcggcccctgtggtctccctcctcaagctgtacaaaggaaaggaggaccagcctcggaggaaacaacaccatcagcaggaggaggggaggagacagcatcatttgaacaataataatccagatgctgccaacagaaacctaaaacaccaacacgatactaggcgtggcactcccccctctgttcctccatatcctcagaaccatgctagtcctaaccctagacaccctcctgtgcaggttccccagttcccgtactatccccgccaggtcctcgcccctccaacagccctcacgtctttctacccacccccgccaccgcctcctaggcctagatcatactacaggccgagatatggaggaggaagaggtggtagccgaggaggggggaacgccaagtggttgccgaaagaagaagagatggggcagccattgacaccacctataacaccacgttctgaggcagctgctgttactggcactacgactggacctgaagatgttgtccagtcaattcaagcacttgcaatctagttcagcagttgcctggccggacagtataagacaacatatgtctatatacctcaccgtaacagataaccttcatcctacatcgtcttataacaacattgaagaaaaaaaaaaccaaaaaaaactaaaatagtcctttgttttctcttaaatgcaagagaatatacataaacttgtttataaatatatacacataatatatgtaaaataaatttgaaaacaatatttgtttgttttctgttatgacttaaattttttaagttaaaggatagcacacaaataatttgttaattctagtccaggaataaatgggacttattgtgagaaaagagactgtttgatataattgtaaatattatatatgtgacgttcacttgttaacttaagcacattgttatataaatagtgccatttttttttttactgtatggatcttgaattatttcaccaattagactttatcagactttttctaacttgaacgaaaacattattgctcaaaattcgtgataaaattttatgaaagtagaattttggaattatgaagcatctcattagaacgttgtagtctcatctagataaatcagttttaatctccatttgaaaaatttttgtcaagattttcttgataaattgagatcttaaagtccaaaagtgtaacagttataaaatggcaacgattagcacttgtacctgttaacgcgttggggtttagttagtttaatttttataaaagacactatcttgaaaagatgtacttattatgtttggaatttgtatggaagtccgagttagcagttttttaaagtgcatttctggtctttgtgataatacaatatcagaagtaagttaaataaatgtgtatttgtgtaaaataatataaatatatatttagttatatata

SEQ ID NO: 196 - DNA, 2823 bp, Nezara viridula
ggtgcttaagcctgacgttagagtgtgtgttgtgttttttttattttctttagtcgttatattttctacttatgcatttatttttatttttgtgtgtccgcgcctcttgtttaaactagtttccgtatttttgttatgttgtcacttaatttttttaaagatttttgtaacgcttagttatctgtaataatagatgttcatttgtctgccgccatattatttaggtcattttttcttaaccgaaataagtgaaaatgaattgtaagaactgtttaaacttgaaggtattttagaattttgatctgaggtgaaattgttggtaaagatacttggaaatttataaggcagaagtgagtgaatctcttactgcttaatatggctgctccaataaaaaatcaaaaaaatttggcagcattaaatgatgataaagaactcatcaacaaagaacacactgatacagcatcaaatatcagtagtaaccatttaaatgccccaaaacatgggactgtgattcctaacagagtgtttgttggtggaatttcaccttcaacaaccgaattagatttagttcatttattttccagctatggaaatgttactggcactaaaataatttctgatcgtgcaggagtttctaaaggatacgggtttgttacgttcgagaccgaagaggaagccaaacgtttacaaaaggatgcagaaaatatcgtattaggacagcgacggctgaatatagcacctgccattaagaaacagagcttcggtcgcagtacctatgattgttcagcgggtggtccagtatctccttctcaactgtaccgtcaaaatggcgttacatatgcttttcacaacggtatggctttttttcaacaaccaactccatcattacctccatcagcccatattgaacatatgccagtcttccaatcaggtccgccatatggagcgatgacgcctagcagtcctggaccagcatacccatttccgtatgcgccgcaaggacaactgttttatcaagctccacagtatcaatatcatgttcctcaatatgaaggctattacgaagcaagccaggtgatggttactggattatataattgtgattttcagcaatatgaaggctgttacgaagcaagccaggtgatggttactgacggaagcctggttattcctcagtattacctgacacatcaaccaacacctgaattggctttttaccagccagctacagtgcacccgcaagaggcatcaccacaatctgtgccacctttgttatatgcttcacctaggacttatgagtctgctattatctattccacggagccaaaatgtggattggagaatggtatgatcaatcataatggaggtggtatggctgtgataaataaggaggagggagaaccaccagcccaaaacccgaggcgaacccgtgaggcagcccctgtggtttcctacgttaaaatgagtaaaggaaaggaggaccagcctcgaaggaaacatcaccaccaacacgacgaggggaggaggcagcatcatcatttgaacaataataatccagatgctgctaacaggaacttgaaacatgatgcaaggcgtggcactcccccctctgttcccccatttccagccaaccatacttgtcctaacccaagacaccctcctgtacaggttcctcagttcccgtactatccccgccaggtcctcgcccctcctacagccctcacgtctttctacccacccccaccaccacctgcccggccaaggtcatactacaggccgagatatggaggaggaagaggtgggagcagaggaggaggaaatgccaagtggttgcctgttcctaaagaagaagagctggggttgtcccaggcactgacaccacccgtaacaccccgtaatcctgatacagctgctgttactggcactacgaatggacctgacgacgtcgtccagtcgatccaaggactttcactctagtctagagctgttgcctggccggacagtataagacacgatatgtctatatacctcacatcagataaccttcattctgcaactatcaacttgatctcattgaagaaaaaaaccccaaaaaaaactaaaatagtcctttgttttctcttaaatgcaagagaatctgcataaacttgtttataaatatatacacataatatatgtaaaataaatttgaaaacaataactgcttgttttctgttatgactttaaatttttaagctcaaacacaacacaccaaatatttgtgaaatctagtccaatacaggactcattgagaatagagactgtttgatataattgtaaatattatatatatgacgtttacctattaacttaagcacattgttgtaaaatagtgccattttttttttactgtatggatcttgaattatttcactatttagactttatcagactttttctaccttaaacgaaaacattattgctcaaaattggtgataaaattttatgaaagtagaattttgggtttataaaggtttatagtttctcaatagaacactgtagtctcatatagataattcagttttaatctccatttgaattttttgcaatccaaaagtgtaacagttataaaatggcaaggattaacacttgtacctgttaacgctattggaattggctagttaaattgttttaaaagacattatcttgaaaagaaagatgtacttatactgaaatttgtatgaatgagttggcagttgtttaagtgcatttctggtctttgtgataataccagtctattaaagtatctaataaatgtacttatactgaaatttgtatgaatga

SEQ ID NO: 197 - DNA, 2006 bp, Helicoverpa zea
caactgttgacctagttccctcgcctagtaaaaatagcggtcgacaatagctcaaacactatttatagtgcgtatctaaaaaaatctcaaatcacacactgttatctcggttgttttttttcgaaacatcactcgaataccgtccgtgtgtcagtcacgtcgtggtccgtacggcgcaagtctggagcccacctatacaacacaagtgctaccgtaatcgataaaacctcgcgtgaaagacagtcagttgttttttcgtgaataccagtgcccttttagttgccgctagagattttagtttagtaaacaagggaacatgttatattagtgttttaaagtgttagaaacaatggaaagtgttaagaggtacataaggagtgagtctgcgagttgcgctcatatggttgaagaaagcacggcgaataacaggaagacggcagacccccacgagaagctgaaggctttgttgaactcccctgatgacgatacggacgacaccttgcctccatcagatgctcctaaattcgggacagttatacacaatagaattttcgtgggaggcttctctttgaccacgactgatgaggacctgtggaagttcttctcagggttcgcgacggtcacagcagccagggtgatctacgacagagctggcgtctccaagtgttacggcttcgtcacattcgccagccccagggtcgcgaggctgatcgttaaacagagcgggggagtgatgttctcgccactggggcgactgcgggtggcacaggctgtcaggaaacagatgagccaactcccagtgctaggctcagaggcagccccgctccaggctccactttgctaccagctgctgtgtgctccacccctcgcgcctctgcagccctgcgcgccatgcgagttgcctccaccaccgtatgctgtgtacccgctgccgtttgacacaaccccagcgatctacggtcccccagctcagtacgcgctggtgccagctccatacagcactccatgctgtgagccctcatgctgtgcacccctcgacaagcagccccgggtgccgccgccaccgttacaccccgcgttcatttactagactcaccccccaagaaatatattaaaggcattctcgtttagatttggaagtacttaaaaattactactgatggtggatttaaggtatatttgtgagagaatgaactatttattggaagtaaaacacgttctaataacagtatggaacataataacaactgtatggtataaagcgcattgtacatggaatcgtgagtacagatgctgtgaattttttaatggaatgtacagctgtaacaaagtatacaaaaagccagcaaaagataccgcaagatacgaaactttaacaagataaggccacaacagcaatgcatcttgtagataacgtagtatttgtcaaaatattaacattctctatatgaaataagattttttccactgtcacgataatatctcctaaaaatactatcaataattcttatagccaatgtctttgatatatttctgctcataacatcattcgcgaagaaggtttatttacaaattgttcagcttcttcgatgtattccatcttgattgctcaagtcttccaatccagttcatgctcatcttcaaacataactcctctatgaataaactgtctgtgagtttgtttgtgactaatctacggacatccagctgcgatggtgtaagtgttcaagttgtcacgtttgtttacatttctctgattgtctggtcgcttttatttatagacgtaagtacctatatttagcttcaacctggtatatttaagaaaccgtggattcacgtgctatcattattattatagtgaattttattggtgtatcaaattgctatttaaatcagataaccttgatcattccgtgtcgtgactttcaagtttagataacaataattatgtcatccacatacctacaacgatctaaatgtgacatgcttgtatctgtgttaaattt

SEQ ID NO: 198 - DNA, 6665 bp, Ostrinia nubilalis
agtgcgtatctttaaatctgaaagcatacagtcttatctggttgttgtttcggcgacagatgtggagtgcgtaaggccgctccgcgcacccatgtacacctcgcaaaatcgatagctcagcgtccgtctcagtgtcgacttgttttccatcgaatttagtgctcgcttagtccgctagcgtttttgttagaagtatcatgttaaattaataatggaatcgtcagtaaagaggtacattaggagtgattcagcgaactgcgcgcatatggttgaggagagtgcagcgagttgtagaaaagtggtggatccccacgagaagttgaaagcgctgctgaactcgcctgaggaggacacggacgactcgttgccgccgacggatgccccgaagttcgggactgtgatacataatagaatttttgtggggggtttctcgttgacgacgactgatgaagacctgtggaagttcttctctgggttctcgacggtgacggcggcgagggtgatctacgacagagctggagtctccaagtgctacgggttcgtgacgttcgcgagtccccgggtcgccaggctgatcgtgaaacagagcggcggagtcatgttctccccgttgggacgtctccgagtagcacaggcggtcagaaagcagatgacccagttaccagtgctggactcgggagcggcgccgctacaagcgccgctgtgctaccagctgctatgtgcaccgccgcttgcgcctctgccaacctgtgcgccctgcgagctgccgcccccgccatatgctgtgtaccctctgccatttgacaccactccagcaatatacggccccccagcgcagtacacactagtcccggctccctactcggctccctgctgcgagccagcttgctgcgcacccctcgacaagcagccccgtatcccgccgccaccactgcaccccgcgttcatctactaggccagggccattagtttccagaagtgtgtcttctgaaagcctggctctgggagctggtaaggtttttgctttggaatttccaggttttgatgaaatcggcaataaagtaaacttttcaggaggctttgattcctttgaagatgaagaaatgcgactgcaaaggataaggttgatgatgaaagttatgatttcgtcgatagcaaagtgaagttttcaagaggctttgattcgttggacgtaaaggaaaagtaaccgaatgcaaaggataggattgttgatgaatgaattgttaaggaagtagactaattaaaagcaataaattctcaggttaagtagattggaagaagtaatgctaaggaagtaaaggacaaaatgcctctcgaaagttcttggaaattcaggaaattagcactcaagccttgtaacatcaatgctcccagaacccagaaccttttggttagttctcaagtagaccagtttcctgttcattatgcgttttatatctatcgcataatgttccagtcactggctttgatatttgagaacgatgacgtacacttttggaaactaatctaagtagatatttaagtgtgtatttaggggatcatcgtcagaaactagaactggttggtgcagtgagagcatcctcgttaattttatcagaagacgaataaaaatgacgtgaattttaacgtaatcgatgggaaattttcgatcgtctgcaagcttcctaaataccccaattccatattgtctatcaccactcccccattggtaattaaacatggttcctctccttaaggtttggtttcttaggttagtttcatttgaaggttgttcccaaattgttccttttgctcaagtcttccaactttatcatgctcaagttgtttcacttccattatttcaagccattgtaatcaggcgattttgttgtggtattagagtaaaactagctgtactattaaattttgctgaatttgaaataatgatagaggaaacttattcgaaagaaatatcaggtgatctgtattcttcttataatgatgagcctaaatcctggtgttttatcatcttgctaatgaagtgtgaaatatttcaatgaagtttatatcatcatcatcaccaacagccctttatagtccactgctggactcctttagtggaggaaagttacttgatgttattcaatacaaaggtgtccctaatgccacaagaaaatcgcctgaacaaattcctccattaccctatttatagaatttcgaattgattgggaaacgtgaaagatctggtgttgaaagtgttcatggtaggtataactttctggtgtgttttgaccgttttgtctcctgtacgtagtctggttgcttttatttttagacttaagtgttagcttggacaatcggtgtaaaaactgtgggttcgtgtgctatcagtaccatagtgtgtaatataatagatatataaaatcattttaacttctttacttgacggaaattttctatttgcaagagaattttgtctgtcaccatgtgcagagttgttcttagcaagtccatgtaccacaagataattaatttctaaacttgatttgaaattcaaaaatcattgaagaaattggtcattttgaagtagaattttgtggcaaaagaaaacatgaagtgattttatgtatctatgaaagatgggtgttagataataaagtgcaaaatgagcacaacgattcatagcacaaaacggctaagttgctagatgtagaagacgttacctccgtggaaaaagacatatttgttgtattagcttgttatccttgaaaaggagtttcgtttaccttagtgtaaggttgttttcgaaagcaattgacatagacagagatataaacctattttttaataaatttagtttttacatgttgttgattgtcactttattaaatctggggtccaaatgtgaaggcatgtaaacattgaaacttatttcttttagcagatgtctgtggtgtatttgatgtttatatttctacacatgaatgtttgttgaaaagacgacgataagaactttgtttcagatatacaatagttgttgcagtgttaaataatccttttgacgttgttatttgcttgtttggtaaataaatagatgaccaggatgttatagttctcataagactaattgcaaagtcaggaacgtttattaatatgattagttatatcgaattctattaaaaatgttacactgtcatgtcttccttgtttttctgagcttcatcgttatttaccaaacaacatggtttattttatagacagtttgatggctaccttacgttaggtgtaatgttagttgttattacgttgtccacaagttttgatggatcgaagtacacaaatcgtcaacgatgtgatatgggatattcaataacgtagcattagttttatttgttagaagacttaatagttttagattcaacacatttttaaataacgtcgtttgtctatcactcggaaaaataggaccaaagacattcgcagaagcgtgcaaatggtcacctgtagtagtgagtcacaaagtctcttaatacgtaaattcgttgtaagtgggtgttgataatttttatattcgtcacttttagagctctttaatagagtttcctgtagacctagagagccgatgctcttcaacatttccaaattgtgttgtattattaaaattttatcacgagaactagcttgctcgtccaagcaataaattcttgctctgcccttagtaataaggcttatctcaattattatattacatcatatacgattagtattactggaaatgcggtcaatttgtcgttttggatttttatgactattattgttagtactaagtctagtatattgtgtaatcttgcgatgcttttgtgctcaaggtgttatcttttttttttgttttatttatttggtacacttttcgcaacttgggctatgttttcacagcgcttacaattaaagctttcttttcagcttttaatgtatgctagtacttggctagtaagctttgctttaggaacgacactggagcatttggtaagtgtgattgaatgtacacactcaaaaatagtcgcatctgatcttgcattgatttttctctggccagcatgagatggtattgccgtatcctctaaaataaattttatcttaattatcacagtggaaatctaagtgcttggccaggttgcacagacgggtgcatagcgtcaaacatataacgcgtacgggcgccattatcgacactcgattaagatttcataatatgtttgagtacaacaaagcgatgcgcctttgtgtgcagcctggtcaagcaccataagtagtactattttatcgtatagttaaatcgtcgttttattatttcaaagcaaagtgaaagcatagccattaattattgtggtcgtataactatcatgatgttatggatgtttcggcatgttctgttgatgcaaagtgttgtgaactcgtagtctcttctgtgctatgtgaagtacaagatattttatatgcgagctattgtaggttattattaagcatgaaactctatctatcacttatcgctgcttggtctctatcatgaatatgtatgtctatttctttatgtggtatcaatagcaaaatttgtaggacaaacaaaactttttcattttattctgtctaaactgccaagtttatattattatcttttctcttcaacttttttctactatttctttaaatattattcaacttaaagtacctagtaatactcattattgttacaagcattatagtagtaaagtttccgtattaaatggaaaaaaatatcaatttcgtgtattgatggcatgataagagtttgttataggtaatttatgattctagctacaataataataattatgcaagatatagaatttttaagtaattattttgatgtttttttttatagtattttatatcagtaaaaacatatgtattcatggtattggccttttctaccaatattgcgtggcctagtgacaactgcctgacatatcggataattaatcactatgctatagtatattattttttgtataacttgtcttgtatataatctctcgctagatatattagattcgtgaaattaaaatgatgtaatttagacaatattactctaaactatattaggaaaaatactaaggtaagtaatatagtgtaatctatgtctatattctgtgtaagtggatcactcctatatcttttagcaaaggcttagaaaacgttgtgattcagaagttttgaatatctaaatgttgctaaattgtgtaagaaatataaaagtatattagggaagctaccctcctcagatatcgctagattagcagtaaaattttgcagacacgtctttaataaaatatagcttaaactgtcatttatattatattatcattaataatatatttgttcgtactttatattattttctagctgaaactgttaataatattcaaattttcatataggtaatatagccgttcaggacttgaaacaaaaacatttttttaatccgtttaccaaagtacttgaacaaaaaaagcagcagtcacaccagcaaatgtcacctttgattatatttttgttatttcatagaatatatctaaatccgtctgaatttccgctgatttatttatacttatatgtatatacagggacgatgacaatatacaaaagttgttaagaaaaaataaactttttgagtagttggtaatcctgagaagaatgaacgtccaatttgtttttgtttacatttcgcaaaggcagaatgtatgctgtttaattgtaatgttgttaccatgttgatatcaaatatcaacagctgtgtgttatgtcatccgttaaaaatagcatcattattagcaagaataataaatcataatttaacaatattatttagttgattaataaattatattatggttgtcacctaaaaggcttaaaatgactactttttcagtagttaattaatttacaaattgtaaaacaaaaaagcaatcgaaaaaaacttaacattcatgttgttgttcaaattctatttctaaatctcgatggtataattattaaggtggatacatactttgtgaaacgaacctacattattatttcagcaaatgcttcacaatcaaaatgcctcagtgtgagctgtgcataactatgcagtagtagagtagctgttcagcatgctctttggaacatatttacgtgaatgacatacaggtagatagattgtatttgcttgcttttcacgcaaaggataatgctggtatgcttacaaaagcacctttaacagaggcattcgttttacaccgtgtacggtgtatgcctcaaaaagtctgtatctacctttatatgcactttgcttcggcgggtagtctacatgggagcttccttatttctatacaacgacttgtaatataacaaaagcttttgaaatattctaaactacgcctaccagaaattatctatttaactagtcaaactctatttaattttattcaaaccaagaagctgtcacgcatttgtctaaagcgttaccgctatttagttatgaagagttcataattattgttgtacttaataatgagttgctaactaattaactgcgtacttaaataaaaatatatcaaaataatatttatattttttgtccaggt

SEQ ID NO: 199 - DNA, 6032 bp, Spodoptera frugiperda
gtcaaccgctgacctagttccctcgcctagtaaaaatagcggtcgacaatagctcaaacactatttatagtgcgtatctaaaaaaatcttaaatcacacactgttatctcgcttgttttttttttaaacatcactcgaataccgtccgtgtgtcagtcacgtcgtggcccgtaacgcgcaactcccaaaacctacctatacaacataagtgccaccgtaatcgataaaacctcgcgttacagacaatcagttgttttttcgtgaataccagtgcccttttagttgccgctagagattttagtttagtaaacaagggaacatgttatattagtgttttaaagtgttagatacaatggaaagtgttaagaggtacataaggagtgagtctgcgagttgcgctcatatggttgaagaaagcactgcgaataacaggaagacggcagacccgcacgagaagctgaaggcgctgctgaactcccccgaggatgacacggacgacaccctgcctccgtcagacgcccccaagttcgggacagtcatacacaatagaatcttcgtgggaggcttctctctgaccacgactgacgaggacctgtggaagttcttctcaggtttcgcgaccgtcacagccgccagggtgatctacgaccgagctggtgtctccaagtgttatggtttcgtcacattcgccagccccagagtcgcgaggctgattgtcaaacagagtggtggagtgatgttctcgccgctgggacgacttcgggtggcgcaggctgtcaggaaacagatgagccagctcccggtgctgggtacagaagcagctcccctgcaggctccgctctgctaccagctgctgtgcgcccctcccctggcaccactccagccctgcgccccctgcgagctgcccccgcccccatacgccgtctatcccctgccgtttgacaccacaccagcgatctacggccccccagcccagtacgccctggtaccagctccgtacagcaccccgtgctgcgagccctcatgctgtgcccccctggacaagcagcccagggtaccaccgccgccgctgcaccctgcattcatctactaaactcactcactcacgaaatatctcgaagacattcaaattcaaggtaaccatttcatactagatgtcgagtaagcgacaaaaatgtattgtgaagctaatatagcaaaaatcgaacagaacatagttgaaattagtaaaacagatagagttaatatgtgtaccaatgatgtaactagtcaggtgtaagtcaaaacaataatggcaataattgtggacaacgaatgtaatgcactaacgtaagtactgagttttgtttgtagcactgatcgtgtacatagatgtaatgggatgacgcgctgataacgacggagtaccgagcgatctaaagataaagcgagatatcaactcgaagcaagataagacgagagcgatgcagctccttacaaatacatttcaccacgtctgtttgttctatctcgttcctctcataaataattcatatttcaatgtcttcgatatatttccacacgacaccattcgcgaagaagattactttactaattatattcagcttcttcgtatgtattccatcttgattgctcaagtcttccaatccagttcatagtcatctgtcttcaatacattacttccctataatgaaactatttgtgagagattgtctgtgactattcaatggacatcaaagctgagagaaggcgatgtatgtgttcaagttagctctcgggtttgtttagatttttctgaatgtctgtcttgtcgcttttatttatagatttaagatatttagcttgaaactggtatatttaagagaccgtggattcgtgtgctatggttattattatagtgaattatatcgatgtatcaaattgatgtttgaataaaagtcgtgcgatgtcccgtggaaatactttaaccacaaatatttaatgtcatctgcatgtataaatccaattatcataatgtgtatattcatatatctatttacacagtcttgtatttgaatgcgaaaagtaattcaacatttttatcaaagttatcgctctatagtaatattgtaacgcgcccaagggaaatcaatttgatacatctttagtttttctcatgataagtgtgaaaataccgaatataaaataactctagtgcggatatttctacaaaatatttaactgaatcatatttacagaatgtatgttagagcagtccacagcctcggtctaagtcattgtaataatgttcacgtaatgtatgctaatgaaattattcaaatatgtaccgtacctagtttccatatatccgcactcgagtcaagtatttacaaacacagttcaaaaatgtgcgttataagcacaacgaattaagcacaaaatcgaatagcagctagttttagatgacgttacctctgataaaagacagatttgttattgcttgttatccttgaaaaggatttttgtttatccttagtgtaagattgttttgtgaaaccccactgttggttggcggacgtcttgggggtggtgggagacacgattttgatagaagacaatttgtagaataatcataacttgtaattgagtaagaagatattggtaagagagatatatcgcttgtacgagctgtagatgtggaggtaggtagacaattagagatcttatcggttggctgcttgcctacttaacgagggacctagtttgaagataataatagtacttttagagccagattttagaaccaacctcaagacgtcagacaacgcgtgactagaacagagagaaacaaaaatattttttaatattatttagtttttacatgttgctgttgaaatacactggggtccaatatgtgataaggaaatgtgaaattcaaagttgaacgaacattttggaaatcacatttctatacccgttattgttgcgttggaaataagaatcgaatcagtttttatgatgcacacattaacttgctaagacgtgacgtgtttcagtaagatctacttaaagttaccggagaatgttgtcaaagtatttatgaggaacgaaatgaagtatagatgttactgagacatgttaacgatgcaatcacgaatagtatttgttttgtaattgttaacattgattgaacagccgctgttcgcttcgaagtgatcaacaatagacttgacaaacggatccataaagcaataatgtcgtcaagatgtgatatgggataatttgttgactagcaatagttttatttagatacattagagagtagattgttttaaaatccttcattttacggcccgttgcatcgtatttaacataaatattgaagaatttaaataattattgtataaggtctctagcacatgtgataacttccatgtcctcgttcttcgtcctatggcgtatatgtggcttgtctaagctagaatttccccctgatgcaattgggttctcacttagtaccagattatttataggaccaaacaaagattcccttacatcacgactaacgcagagatcttcgcatctattctgtctagactagtatacctatcacaaatctctatacgtaaaattgttgtattaatattaatcattttgatattatattctatcactttttatggccgctagttgtgtgatgctacggtgaatgaatttgcgtttatatcaaggtcttccttgttgttttttatatcactggttaagacaacttcactgttattgttattatttattttcatgtttactgtcccattgtttgtaggtgatggttctttaagatcaatttctagtactgtcgtgttattacctcataggtttgaggtaatgtctacatgattcttccactagtcagatcgacagattgtcagcagagttagcagtacctgttagataagtaaaggttccattaatttcttcgtccaaatgttaagttgtttctactctatcagcaagttcattcacccaagcacgttcgatgtggtcttctgcctttagatgtaaggctttcgtctcaattactattgtacatcataattatacgattagtgttattgaaaatgctgtcaatttatcgtcttggatttttataatgtatgtatttattgttagttgtaagtatagtacttatgcgatgcttcgctcgagtatcatttatgtctgtatcttcgtgtgcttataacttaagttccttggatttgtgttacctcagactaaagtttatatctaaaatattgttgttatatcatattctatctatgttggttcatgcgatgggagttttattttgaatttggggaaaatgggccatgtttgtggaatgtcgttattgtccgaaacgtcaaaagatactaactttaattcaaggtcactgaaagtatgattcgatctaattgaagattttaatcatgatcaaggtttagagcagctgatgtgttcacacaaaatccgtaacgaaatatgaaaatgtcttagagatggctgttgctagggttgcttcaatgttggtcagctatgaccattttctccaacatcaaatcatcgcgtgaaccagattagcactcatcgtatacatttcgatgttgcactatcgatgtttcgagtacaaggaatctatatccaagctaaacttaagtctaataactatcactttcattgcttctaaggtttctcacgtaaatacatattaagcattcaaaaacgcatttattaagattgaaacacccataaaaaattgtgaaaaatgtcttaaactgtgagtttttgttccaaattatgaattatacgactatgaagtgctcatatagcaattttttgatgaaagaaatgagttgttttctgctgtagatatgtatttacgtgagaaacatactacgaacataataagtggcctagagacatactgcctaacatatcggataacgaatcactacgctatagttagttattttttttataactgtatataatctctcgctaggtggtcatagttgtgtggacgaatataatgttagacaatattaatgtaattataggttaggaagattaacgtgtatttattgaaattgtcacttatcttaggattggcttagtattgtgaattgttttttataggactgactttagtatgggaagcaatgatggtaatgagtaatttaaaggagaggatgtgttaagaaaaggtaaacatcgagtgggagaaagggatgtttaaagatttctatttaaagtagaggttcaatttatccttggaataaagatcagaatgcaaaagataactaaaaatgagattataagaaaggaccacacacataaatggtcatttgacttcctaaaatcttggagattttgaaataggttctctggaaagcgttagtgttctcttaaaggataattagagtcagttctataaaaacactatctgtcgccatgtgaactgtagttataattaattttagtgtgaaagctatcaatagcagtagtgacactcactgtatcactgtcggtcactttctcatcatcctgattggttactggttcgatattatcttttattactttatcattattatctgtacccttagtacgaatttgctttacgtttaacgagatcgaaattttagcgcatttggtactctgattggttggtttattgtagccggccaatcacggcgctgaacgcggtaaagcaaacttatactaaggtctcagtaacccccaaaatcacttcgatgtcgtatttgtttgtgactcgatatcggatcggaaaatctgaagacgctcctattgaatgcggtttttattcctacatggaacaattaatttggaatgttttcttaaattacggtacggtacctatgttttctcgtacaaaattcaacgcgttcggtgctctgattggcctggttaattcgcaacggccaatcagagcgccgaacgcggtctcatttcgttaatgagcacaatttttatagctgttagcactcagattttag

SEQ ID NO: 200 - DNA, 3624 bp, Diabrotica undecimpunctata
aagaataatcatacaacaactattaccggcaaagttttttcgaataagttgttcatggtttaatttgttccaggagaccactttaatttagagcccacttaaaatgccacctaaaaacaaatctagaaatgcattttactactttatggaagatttcaaacaaagacaaggatttacttctaaatccatgaaggatgtagcagaagctgcaggtccccattgggctaggatgtctaaagcagaaagaagaccttatgaagacagagcaaacaaagagaagggaggtttgagatatacttgggatggacaatgcgttgaagaaatagagaagagacaaaaagctgaagaaaataatattgctaaaatgaaagatgacatcgactgcaccttgaaatttgcgaaagaaaattgtcgcctccgagatgaaatgttcttcttaatccatatcaatactttctgttatcatgccagtggtaatcggtattatcccgctgaaattgctatttcctgctttagtttggaagatggcgttttacctcaaaatgtttttcataaaactattaagccaggtagactaccgctggggtatgctagtgatgcaaaaaagcaatctgaagattcacatcaacttcctatccctttaactggtgaatatgacgacaatgtggaagaagtttatacagaaatgaaagagtttttatcctctaaaacaggaaattcaaaaaattttcctcccttatatgctaagaaagatatcgttaaaatggttcaacacgtgttagatagttggtgcgctgattttgatgagccgccattatttaaagtttattatttacagtatatgtttcaagtactaaaaaactcggtagctaatgacaatgtatggcccttgtattcaatggcagagacggaagttgataaggatctttattcccatactgctggaatatgttgtgactttcattctgttagtgaagcttgtcaattctgtagccgttctgtggttgtcagacttgcttatacaatttgtgataattgctgttcatttcttaatattcctatagagtctggaagacatgtacctgatcaagcttttacagcatccagtttgagttcaagagcttcatcaaaagctagtttgtattcagcttctagtaaatcttctaagaagcaatcagttcgtgaagatgacaaagacaccgttatatcgttttctagtgcctctcaatgggagaacgaatctgtaatgtcagactcctctacatctactttcaataatggctttccaggtttgaaatctaaatggacattaagcaattctcaacctgtagcatccgactcaatgagccaaatgtcaggcccgagctatgcaagtgctatgggaaatagaagacctaatagagatttttctagtgctgtgggaaacagaggacctcaaaaagagtttcctaaaaattccgataatgatcactccagtgattcgactaccgattatttaaacagtcaatcatttccggctctgggaagaggaagaggtttgggcagaaatcgacgaaattgatcatttttgactgcaatgggtcttgttccacttcataagattgttaaaagaatatgtaactgtttacattaggcggctagccaatactcacattgtctctaaaaccactaactgaacaaataatcactaactattgcttttattatattacagcgaaattaaacaactttatgagactgttttaccttaattcacaatttttctttatatgtatttgaataaaatagaaacaaatctaatacttcctctgtcacttttctttaaaaggcactagatggcgcctgatatgttgatataatgatctaaaatcgcccgccatgtaaaaaaaacaatttgcaactttctgctttaactctagaatactaaccttatttttactatcatttacactaaccatcgtaaaatttactacgctgggaaaaaaatgtggttgctgaaaaagtattttatataacgcaattttacaaattattttgaacaaagagatgtttctaaaacctgaaaatcacaaaaaaatataaattctaaattttagaactacactgctgacaacaaagggcgcgatgttcaccacaaaatggacgtcggcagtgttcgcaatgatgagttgtcattcgacgttttttagacggacaaaattgacacatggcacgttttgacacagtagggcatattcgttcttgctgcggctccagatttaaaatattttcaataagtaactttaccgagcggttcaaagttggccaatttacacgatgctgtagccaaggtttagtcagttgttcagacaaaatggccataaatttttttctggtgatggtttttttctgctgtcgttgttggttatgattataaattatccaagagtgtatgcaagctatatttaacatgccatagaacaggcaaagaggccatcttgtttttttagagatgttcatgtttccgcacatttggtcaaattttggtcaatccgtacttggttgcattataaaatataatgatatctggctttcctgttcgatcacattctactggaccattgtggattgtcgacagaagaagcacagacttatttacttttgtcttataggataccattgttttttcaccatcaaagcaaaataaggaatgaccaatttcacgatttttgagatttatcatctcgggaggtatttctcttttattttgccgtagggtaccaacaatagttaaatcgtaaggaggttttaagagctccgttgctagtggtactgacgtaaaccaattatccatggttacgttacggttacttccatactcaccctgagttaattgttttacataatattcttctagaggctgtccgttgatgttagttccatcgaacatatatttggtatttacgtcacacagcatctattttgagtccatatttggctggcttgtttgggatatatagaaaggacatctttccctaaaagccaataactactcatcgattgttaggtatgatccgggcttataggacgttttgcagttctgtataagatcatcccatatttcacgaatggctgctgataggtatgtttcgtttctgcctggtctagacattttatcatcaaaacgtagacattccataagaaattcaaatctttcccggtccataattgctttttatatcgccccagaaattttgtgataaagcatttgtcttgtcgctaaatgattgtccttttgggcagcagcaaaaataagtagtcctagaagtgcatacaattcgtcaatatttagtttcgagtttgtaagtttttcgactttatatttttgtgccctaacagaaatttcggcatttgtatattctagaattttttccagtgaatttggactcataaaacaatgaaaagcatctaagggagtttgtgcttccttggttttattagtgaggccttgaacaaaatgtacgaaattacgttttggagttttagttgcggcctttggttgagaggaccatctgtgtccatttttaccttttagactcgacagcaaccgagtttgcttccctttagctgcaatttctggagatt

SEQ ID NO: 201 - DNA, 1520 bp, Leptinotarsa decemlineata
atcactttcaataaattcattcaattaaaggatttttcttatttgtgaaactcttcaactacaattacaatgcctcctaagaaaaaacagacttctggaaatgctttcttccacttcatgcaagacttcaaaaatagacaaggaagacatttcaaaaatatgcaagaggtagccgaggctgccagtccgcattggaacaggatgtcaaaggaacaacgaaaaccatacgaagagatggctttaatggctaagaataatttgcgtggaggtaaatttacctccgatggtttggatattgaagtattagaaaatattgagaaggaagagcaggcaaaaattcaacagatgaaaaatgatattaattatatatggaaagtggcgagttcaaatggaaggattgcagatgaacttatttttattatacatatcaatatatttgtccattgtacctctgaagaccgacattatccagcagaaatagctattgcctgtttcaacttagaggatggtgttttgccgcaaaatgtttttcatagaataataaaacctggaatgctgcctttaggctatgccagtgacgcaaatgcacattctaagaaaacccatcagttacgaccaccgatggctggtgaggacgataataatattaaagaagtttttgaagaaatgaagcactttctttctaataaattatctggatcaagaagaatgccaattctttacaccactgaaaggaatatgaaaatgattcaacatgttttagatacgtggtgttacgattatgacgaggatactcccctttttaaagtttatagtttggaatatatgttcagaattttgaggaacactgttgctggggatgacgtttggacaaccgatacattcagtacgagagaaatagaaaaagatgtgtacagttttgctagaggtatttgctgtgagtatcacgaagttaccaatgtacccctatattgcagtcgttcaatttgtgttaggcaagctttcaatatttgcgataattgctgctccgatctgcgtatcaccttattacctggagtacacttacctgatgctgctctgacgacggtccgaagaggatctagtagaactgcttcatccgcgccttccatttcttcccaatcttcaaaatatactaatttgaagcaatccacacgtgacgacgattccgaaagtgttatatctttttcgagcaaatcagaatgggataatcaatccctaatctcagaaacgtcaacttccgcaactttggatagcgaagccaattttccttcacttggagcaagaaagaaagtgacctcatcaccattcaacaacttctcttctaatgacttgaacagcagtcagagtaacacctctagcgtcaaaagttacgcaggtgccatgggtacatcagggttgagcaagcgtgcaatggatatgccatcatcttttaccaacacggaaagaaattttgaatcttcaaaatcttcagattatgctccgggccgaggaagaggcgg

SEQ ID NO: 202 - DNA, 1554 bp, Phyllotreta striolata
aatatgtgcattcagcattaacattcaatgtttaaaagtttcgttattaaattttgaatttaaggaaatcgcaaaccgcttgatttgttaaaatggcgcccaaaagaaaagaagccccgaaaaatgcatttttctacttcatgctcgatttccagaaaacacagggccgcaaatttaaaaatttaaaagaggtttctgaagcagcaggccctcattggtctaaaatgtcgccggagcaaagacaaccttacgaagatcgtgcaagaaaagaaagatccggcgtcagatacaccacgactggcgaaaatatagatgacatagagagaagagaacgtgaagaacaaatgagaatccaagagatgcaggaaaaaatcaattgcgatttaaaaatggccaacgattcgggccagctccaagacaagctcttctttatcatacatgttaatattttctgcgaggctcaaggtcggtactatcccgccgaaatagctatagcctgctttagtcttgaggatggagtccatccacaaaacgttttccatcatatcatcaaacccggacctcttcccttgggatatacaggaactgctaagctgatatccgatgaaacacatcatataccatatcctctagtcgacgactgtgacgacaccacagctgaggtgtttcatgacatgaaacaatttttattctcgaaattaccgggtaaaacagttcccgttttatacgctgacgagaagctagcgaaaatggctcaaaaaatattagacacctggtgcgaagatttcgaagacgactgccgtttcaaagtctttaatctccaatacctattcatggagctgaaaaacttcgctgccaatgacacggtttggcctaacggaacgatgagcgccagagaactcgagaaagatccatacgtatacgccagaggcatcgtctgcgattttcacgaaaggaataacgtttatacttattgtagccgttccatagtgatcagaagcgcgttcgtgatttgtaacaactgctgtaagcacttaaacatcgttttaaatcaaggaactcacgtacccgatggagccatgacgcctgcttcatctagagcctccagtagggccagtacggtttcttcgagatcctccaaattccagccttcgattcatgatgatgattcggaaactctggtttcgttctccgtcaaatccgaatgggacagtcgatcggagatgtcagaaacgtccgaattcagcctgactaatgacaatttccctgggttggggttcaatccgaagagcgcgtcttctaattcccaaccttattattcaatgtcgcaggaatccaatatgagccagtcttcttctagaagttacgcaggggcaactggttcatcgaaatggggcagggaacctgcaaatagttctgttccacagaaattttccaatttaaacatacaccaatcttctagtaattttaacgaaggtgacaatccagtcggagctctcagggatccgagacgttatcctgctttgggaagaggaagaagatcataagtttttt

SEQ ID NO: 203 - DNA, 1574 bp, Phyllotreta cruciferae
gacaaccctacgaagaccttgcaaaaagagaccgagccggtatcagatacaccacaacgggcgaaaatatcgaagacgtagaaagaagggaacggcaagaacaattggacattcaaaacatgcaagaacaaatcaattgtgatctaaaagcggccaacgattcgggccagcttcaagacaagattttctttattatacacgttaacatattctgctatcataagactcaagatcggtattatcctgccgaaatagctataacttgctttagccttgaggatggagtccatccgcaaaacgttttccatcatctcatccggccaggacctcttcccttgggctacgctggagaagctaggatgatatccaacgagacacatcgcatacagatgcctttggtagacgattgcgatgacaacacggcagaagtgtttcatgacatgaaacaatttttaatatcaaaatcaccaggtcccaaatgtattcctgttttatacgctgacgagaagctaatgaaaatggcgcaacgtatcttagatacctggtgcgaggatttccaggatgattgtcgtttcaaagtgtacaatcttcaatatttattcatggagctgaaaaatttcgctgctaacgacacagtttggcccaacggaacaatgagcgctagagaactcgagaaagatccatttgtatacgccagaggcattgtatgtgaatttcacgatataaatagcgtttatgttttttgtagccgatccatagtcatcagaagcgcgtacgtcatatgcaacaactgctgcaagcacttaaacatcgttttgaatcctgggactcatgtgcccgatggagccctgacgcctgcttcgtccagagcgtctagcagggccagtacgatttcgtcgagatctactaaattcgagccctcgactcgcgatgacgattccgatactctggtttcgttctccaccaaatccgaatgggacagtcgatcggaaatatcagaaacgtccgaattcagcctgaccaatgacaatttccctggattgggtttcaatcccaagagcgcgtcttctaattctcagccgtattattcgcaagattctaacacgagccagtcttcttccagaagttacgcaggcgctaccggcgtaccgaaatggggcaacagatctgtaaataatgctccgtctgcttcacacaatatgtaccaatcctctagtaacttcgatgaaggccacaatagaatcggagctctgaatgatccgagacgttatcctgcattgggaagaggaagacgaacataaaagtttttaccctttttttaacgcagtaaattttgttaaatttacaatgtatctttaatcatttgttcacaatgttttttttttgcaagagttgattttatttttgtcacattgttattaaaatgtgtttagaagttaagtttgagtactgttacattgttgttgtcagaacaaatgtaaatacagttgtaataataatttaacttggtacacgaacaagtgtatgaaaattaatatgattggtaaagttgtgtaaaaaaatgttattatttt

SEQ ID NO: 204 - DNA, 1695 bp, Epilachna varivestis
gtcagttgcttctacgggtaattctacgattgtgtgtatcagtctgtctactttttgtattaaaggaaataagttttcgggcatttggttattgattaagtttccaccagaatgtcgaaacctaatgcattctacttcttcatgttagatttcaaatcaaaacatggcagaacttatactaatatgaaagatgttgctgcagcagctggaccacactggaaaaacttatcaaaagataaaaaaaaagtatatgaagaaagagcaaaagcagccagaggaactgaaaaactcaattcagatagaagacctgtggaagagattgagcacatggaacgtgaagaaatgcggtataaacaatctatgaaagatgacattacgacaacattagcaactttgaagagggaaaatgcactaaagacccatctattcttcatagtacatatcaatagcttctgccagcatgatcacactaaaatatacagcccttgtgaaattgctattgcggcgttttcattgcaagatggagtgcagcattctaatgtctttcattcgatgatcaaaccaggtctcgtgccccttggatatgctgctgttgcacaacagcattcaaatgaaactcatcaaatcgatttgccgactgacgatgaagacaaccaggataatatattccttcaagttattgaatttttatcacgtagaaaaggacattctgaaaaacttcctattctatatgctgctgaaaaaaatattcctatggtaagtggtgtatttgaggattggtgcactaaagttgatatagatccaagtcggtttcgaatttataatctgcagtatatgttcaaaatattgcgcaacacagtggcaggaagggactgttggacatcagataccatgagttatcatgaaattgagaaggatgtctacaactatgcttcaaatatagcttgcgaatttcacgaaacctgtgatatactcactttctgctctcgttccattgctattcgttatggctatacaatatgtgataattgttgcgaagatgcgaatattgaacttattccggggcgtcacgtgccagaaggctccatgacaactccggatttgagttacgagattgtgaaatcatcccgaaaaaagaaatctaccaagtatacatctgatagcagtagtattagggacgatagcagtgatgttgacactctaatatcaaatgctagtgcaaggtgtcgaaacattgatagaagaggtgatccaggtcaaacaagtagttactcaactgaaagttctgcaggccttgcaactgctcaaggggccagtagtagtgttcatgctactggaagttacgccagagcaacaacctcaaacattggaagttctggattcagcaaaaggcctgcagctatgcccttcaatgtaacagaagatttgaatgctctgaaccttaatccagaatcaatggatgctcattttcccactattggcagtagcatgggaagaggtcgtaatactaaccgaaatactattctaaagggaagaggaagaggaaacccgttccagaggactacatcgagatcataaactcgtaataaattgcccatttgtaattttttctttatgtttattttaaattcttatgacaagttcttattgatgaattaaagaagtttactattgtttatactacttaaggacaat

SEQ ID NO: 205 - DNA, 1314 bp, Tribolium castaneum
atgcctcctaagaagaataagaaatccggcaaaaacggctattgggagtttgttttggattgtcggaataaacatccaaataagcaaaatatgcacgaagtacaagaatacgctgcaaggaaatgggcgtccatgtcaaaggaagaacgccgcccgtatgaagaacgtgccctactagcccgagaaatgtactctcctgccaggtacacaactgatggtattgacattgaagtggttgagagaaaagagcgagatgaagcaaggaagaaacaagaaatgaaagatgacattacgcgaacactgaaagcggcttatttcgccactgatcttgacgaaaaaatattcttagttattcatatcaatcatctggcgtattaccctactgaggataaatattttatttgtgaaatagccatagctgctgtaagtcttaaaaacggagtggaggatgtgtttcatagaattgtcaaacccggaaaacttccgttggggtattatggaggagcattaactcattcgaaggaaactcaccaaatgcttgagttggttcaggatgaaccttatgagaacaatactcgtgaagtttttaatgaaatgacttctttcctgaaactttggagaggcaagggaagtgattctatcgtttatgcggatgagaaaactcatgaaatgataacaaaagtcattgataatttttgccaagaattcaattatcctgacgaaattaaagtctacaacttccaatatctgttttttgctttgagaaactcagtagctgcgcgaaccgtctggcctacagaaacctacagttctaccgaacttgaaaaagacctctacagctacacacctgatatttcttgcgaatttcatgaaatgtcggacatttccgtctactgtagcaagtcaatcgtgaccagatactgctacacactttgtgaccattgctgtactgacttaaacattcaactagtggctgggtttcacgtcccgaaaaattccagaattgcggtagattcgagcaggactaattccaaagccccctcagtctgcagcactgatgattatcgtcaagccgcgagaagccgagttggttcattcagttcaacatacgatgagaattatccagctttggggagcagcagatcaagcgcttcttcggttgtaagtttctcctcaatgaggactccccgaaatgtgggacaaccgaccaaagctgccaccagaattgaacaatccttcaaagccatgtctgtgagagatcaccgcaatctgaatttccccccgaaaggctacgaaaaacaaaatgaaaaataa

SEQ ID NO: 206 - DNA, 1644 bp, Vibidia duodecimguttata
aattgtcatttccataatctctgacccaaaaacttaataaaatgccaaagaagaaaataaatcctttttgggcattccttatggactataaacgggacaataaaattgagtcaatcgatgaagcaaaggctaaggctgatgttatatggcgaagcatgactgaagctgaaaagaagatgtatgctggaagatcaaaacagtctcaagcatccaatgaggctccattgactccgattgaaattagagacaaagaagaaatattattcaagcaaaaaatgctggaagacataactgccgaattgaatattgctcggaaatacaacaaattgtctagctctaaatttttcatcatacacataaatagtttttgttctgaccatcaaaggaatcgaacatatccctgtgaaataggtatcagcagtttttcacttcagagcggtgtttctaaagatgatgtgtaccattcatttatctatccaggttctttgccgcctggatattctggtcaagctaaaattatttccgaacaaactcatcaactgccatgggaaaacagtaatttagataatcagcaagaagtatttgaggaagttatagactttctgtcacaaagatcacaaggttcacaaaaactccctaaactgtatgccataagagaaaaagaattggaaattgttaaaaacgttcttgacacatggtgtgatgactttgatccaaagattagtttcacagtgtataatgctcaaacattgttcactttgttacataaaaatattattgaaaactcaccatgttcttcggaagctctgtgttatcgtgaatttgaaaaagatgttcaccagtacgcaccaaaaattgcttgcgagtaccatgaagaatcggaatgtcctgtttattgttcgagatcaatagcaataagatatggttacattatttgccaaacttgttctcctagtttgggtattcaacttgtatctggatttcacattccaagtaatatgaaacaagctgtaatagaatcaaaaaaaaccttcaagtaccgtgaggttgacagctgtagtacagaaagagatactgaagatacttgtactgttagagacgatagtagtgatgtggatactttggtctctatagggaggaacagtacatatattgaggattcagcatcgtccatttattttccagaatatgatgatatggcacaaaatgtttctagtgacattcgaacaggaggaagatcgggttttagccgaaaacctgctgctttaccatctactgtggatagagtattttctaatctgacattgagccaagattcactcggacgaaggaacaatgaatggccaagcttacgtggaagagggggaggagcaatcccaagaaccaaaggaagaggtcaaccgtttaagaataagtgatacattgaagctttacactcttttctgttcctaaatttctatatttgttgggctaatcattattgtgttatttcagttttatttactgacaatgcaactgattgttgttcaagaaatgacattatttcatttcaattcttttttaaattcattaattttttctgaaaaattgtactagtttatattattctgttattgttttgtttatgttcatgtttaattttct

SEQ ID NO: 207 - DNA, 2052 bp, Helicoverpa zea
gttgaaagtgtcctgtttcagcagttttctttaatttcactttgtcagcaatttcaactgcatttcaacttttcagtcttgctcttgtattctgtgcattagcatcagacagaattcaattttggtgtggtagcgtgttatcttacgtgaattgtttctggcacagtacaaaatgccgaagaaagctcccaaaaacgctttcttctattttatgctgaattataaagacgaacagcagaagaaaggcatcaactatggatcattggctgatgtctcagttgcagcgggcgaagtctggaagactgtaaacccacaagagagagcccgttgggaagccaaagccaaacaagagaggacaaaacaaaatatgccagttgccaagtacacgtctaccggggtcccgctaacggtcatcgaacagcagcagaaagaaatacaagaggcaatccagaatgaaatcgatgatatccggaatatggtcaaaataaaggcttttaatcaaagcattcaggatgaagacttctacgtaatagatgtgaactattactgcaaagcgggaaacacgtatgtgatcggagagagcactgtgttacgattcaacctgaggcttggataccaggatttctatcatgaactcatcaatcctggtcgcatccccgtcggctacgcatcagacgtgaaacacggcagcactgagctaggtctagacatgccagacgaaactgaaaaccagtctaactacatagaaatactagccaacatcattgactacctgaaacagaaggataagaacttgaaagttctgccgcctttgtacactatgcctgagaaagtgctggctgttcaagattttattctgcaaatgagcaataaagcccgtgaggacgagcatatcttccgcgtctacaagttggacacgctgttcttctacctgataaacagcatcaagtccaacaagaacgagggtttccctaaggagtcgctcgctctcatacaactcaagaaggaccccttcaagtatacaccgggattgggctgtgagcatcacgaagccaacgagaaatcaatggagtgcacgagttcccgcacgcagcgctgggcgtacaccgtgatggacagctgctgcccagtcgtgggcatcgacatccagcccggacaacatgtgcctaaggaatatgatgttgatggcatcctgaagtacagagacgctaagaaggtgtggagcggtcccactgtggctggatttaatgatgcatcgtcatcttgtaactcaacagtgaacgattctttcgaggcccctcccagtctccttgaatatgtgggcaaaacgaagcgactcgaagctcgcgtgcacgcgccgcaacgactccccgacgtcaatttcgccaagcctatgctacctcccgagctgacggaggaagccttcccggcactgtctgtgagccacggaagaggtcgcggattggccgggaggaggaacgtcagaaaataaagcattcaatgccaatcttatttttgtactgttatgtaacatatctgacattattattattaatggctgttcctaatattctgtctatccatttatttactcactatagaattttgacatgagccccatacaagtaatgtaaacttcctatctctggtaagatcaaaacaaaagatagataaaatatagggaacggccacagacagacgaactacacaatacgtgattgaaattatactttcaaatgtcatcgaattatgcaccttattgtttgtgtgataaagtgcaaaattgtttgaaagttaaacgggttgattatgttatgatggaaaactctattggtggattttaataaccaatcatttgttgttttacttcctcgagacagatcattttacactacttgtatggggcctatgtaaacattcaatctctgtagggactgaatcaacagattcgttatagaaattgctaataagagtactcgattagtaaggataaatgtagtttgtttgtctacagttaagttttgttataatttcatccagcggtactcaaat

SEQ ID NO: 208 - DNA, 1596 bp, Megacopta cribraria
gtttcttacattattcccttatccgtcaattgctagactgatcccggaattcaaaatcatgccaccaaaaaagaagcaaaagggtggaaggaacggcttttattatttcatgttggatctacagaagcaagaagcactaaaggggaaccgttactcccttcaagaaatttcaggattagcaaaccctttatggtcggatatgtctttagaggaaaggaaaccttttactgatttggcccttaaaaatgcctctaaaaactctggagacttaactaagaagttcacttctttaggaataagttatgctgagttagacgctgaggaaagagaaatagaggatgccagaaacattatgattgcaacaattaagaatactattgcaaatctcgatttaaattctactctgaagagtcatatattctttgtgtgtcatgcaaattatttctataaatctgaaaagcaagtctatttcccagctgaagttgctgttgctgcattttcccttgagctaggtgttcttgcaactttacatttttttgttgatcctgggaaaatccctctcggttttaagtatgaatcttcagaatggtcttcaaggacccatcgcatacctgtcagtgacccatcttggaaagagggaataaaagatccattagaaatgtatcgaagagttaaagaattcatcaagaaatttacagttgggactgaagttcctccaatttatactttgtttgaaacctcgaactcacactatcgtctttctgttgtaaaatctgccttgaatatgatgtgcgaagcggcatatgaagatacatccttatttcgagtatattgtctagcacatttattttttgaaataagaaataaatgttctgcagaaatacctagtgtagctattatgaagaatgaacttgaaaaagacgtgttttcctatgcaagagatttaggatgttattatcatgaggaaaaggatctctcaatacattgctcactctctattgtaactaggtgggtttttattatttgtgaccattgctgtaaacatcttggtattaaactgattctaggaagacatgtcccaaaagatacagctttattagatagggcacattatgtgagaaagagtgatggcttatcaccgaaacaaaatgttgctgaatccagcagtaaaccattgacaataattgaccatggaagtttaaaagaacaaagagctgaagagagaagatctcaagagatgtacttaagagaaagtgaaaaaatcagacctccaaagtactgttacagtgataaaattggtgctagatttagtcaaaatagttcctcacaattgtctcctgaaataggagcaacatccaatgaaaatgaatggtgtctggctaaaggaaagtcttctgggcgaggtcgtggaattttaagttattcatctccagaacatcctcaatggccaatatctggacgaggacgagcttttgcaaattttcataattaaagattttattttgttcctataaaaagcaaagtggttctaatttttagcgttaatatatttttgttttattaaggaaaggtgacagttcctattttaatgcgata

SEQ ID NO: 209 - DNA, 1574 bp, Nezara viridula
acctcgttgtcagacaggcagaagtggccgcgttaccgtaaacaagtaataacaacaattatagataccaaataatgccacagaagaaaaaacaaaaagctgggaaaaacgggttttatttttttatgctggaggttcaaaagcaggaagctctaaagggggttcaatatagtttgcctgaaatttctgaaattgcaaatcccatgtggactaacatgaccccagaagaacgtaaaccatataatgacaaggcatcaacgagtgtttccaaaaatagcgaagacaattcaaaaaaatatacttctttaggcattagctatgccgatgtagatgctggaaagagagagttggacgaagctcgtgatcttatgatagcaactattaaaaacactgtcgcaaatcttgacatcagaacatctctgaagactcataagttctttgtgtgccatgctaactatttctataagtctgatcatcatatttattatcctgctgaaattgctcttgcagccttttctttggagttgggtgttcttggcaccattcatttctttgtagatcctggaaaaatacctcttggtttcaaatatgaagcggcagattggtcaactagaactcatggaattccagtaaatgatgctagttggaatgaagggattaaagatcctctggaaatgtttggaatggttcagtcgtttatcaagaaatttactgagccccctgaagtacctccaatctacacaatgttcgatactttaaatgctgacagtcgtctttctgttgtgaaatctgcattgaatatgttgtgtgatgctgcaaatgaagattcctctctatttcgtgtctattgtttatcacatttattctatgaaattagaaataaatgttctgcagaaataccaagtgtagccataatgaaaagtgaattagacaaagatgttttctcatatgccagggacctaggttgttattatcatgaagaaaaagatctttcgatgtattgttcgctttctatagtaacaagatgggtgtttacaatttgtgatcattgttgcaaacatctgggtgtaaagctcatccttggaagacatgtgccaaaagatacagatctttcagaaagtgctcgatttatagatgataaacaatcttctaataagttagatcatggtgcttcttgtagtaaacccttgaccatcattgaccatggccgtttaaaagaacaaagagctgaacaaaaacgggcgcaggatatgcatttgcgtgcaagtgaaaaaataaggcttcctaaatccagttatagcaacaaaattggtgccagattcagtcaagaaggtgccagtagttctcaaagctctctggaaacaaaagaagaatccaatgaaaatgaatggtgcatcgtaaaaggaaaaggatttggacgcggacgtggtttcactgtagaaaaatcttcagctgaagagcctatctggccagtttctggaaggggtcgagcatttcaacaataaattttaaaagacattttaatatagacaaaaaattttaataattttgatacaagttttttatactgtttt

SEQ ID NO: 210 - DNA, 1640 bp, Euschistus servus
tagattcacgtttggttgaaacctctaagactgacagaccaaaaaggccgcttttgtttaacttgtttatatcgttcacccaggactgtcagtatgccacagaaaaaaaaacaaaaagctgggaaaaatgggttttattattttatgttagaagtacaaaagcaagaagctcataaaggcaataagtattctttgcctgaaatttctgaaattgcaaatccattgtggtctgctatgtcaccagaagaacgtaagccatataatgacaaagcactaatgaacgtttccaaaagtaatgaagacttaacaaagaaatatacttctttgggaattagttatgctgaactagatgccgaacaaagagagttggatgaagcccgaaatatgatgattgctacaattaaaaatacaatagcaaatcttgaccccagaaattctctgaagactcacacattctttgtatgccattctaattatttttataagactgatcatcatgtttattatcctgctgaaatagcttttgctgccttcaatctggagcttggtgttctagccaccctacatttctttgtagaccctggaaagattcctcttggttataaatatgaagctgcagattggtcagctaggactcatggaattccagtaaatgatcctagttggaatgaaggggtcaaagatcctctagaaatgttcagaagggttaaggatttccttaagaattttgctggagactctgaagtacctcctatctacacaatgtttgataatttaaatgctaacagccgtcattctgtagtaaaatctgctttgaatttgatgtgtgatgctgcaaatgaagattcctctctatttcgtgtttattgtttaccccatttattctttgagattagaaataaatgttctgcaggaataccaagtgtggccataatgaaaagtgagttagataaggatgttttttcatatggcagggatataggatgttactatcatgaagaaaaagatctttctatgaattgttcactttccatagtaactagatgggtatttaccatttgtgatcattgttgcaaacatcttggtataaagctcatcctagggagacatgttccaaaagatacagacatttcagaaagtgctcgatttatagaagataaatattctccaaataagcttgatcatagtgattcctatagtaaacctttaaccatcattgaccatggacggttaaaagaacaaagagcagaacaaaaaagaattcaggataaacacttgcgtgaaagtgaaaaaattaggcttccaaaatctgtttacagcaacaagattggtgccagattcagtcaagattcaggcgctaatagttctcaaagctctttggaaatgaaaggaacaaaatcagaagctaatgaaactgattggtgcattgttaaagggagaagcttagggcgtggacgtggctttatcccagaagaaccttcaactgaagagcctaactggccagtttctggaagaggaagagccttccaataataatttatttgagaaattttaatatagacaaaaaactttgtaattttaatatggacgaaaaagattgttatttttaatatttttttatgtaacagtttactatactg

SEQ ID NO: 211 - DNA, 1500 bp, Orius insidiosus
ttctggcttgcaacttgaaaaaaagactcgtgattttacttgtagtctcaactctcaagagtcacgctggaaaagtaaagttgagctgcttatttgttgtcaacgtaccatttttcgtaatatgcctaataaaaagaagaataaagccgtgagaaacggttatttttattttatgcaagatgtccgtgaacgcgaggcactgaaaggccattattttccaagtcaaaagcaagtcgccgatttttgtgctccactttgggcgaatctctctccacaagaaaaggaagattacaacgatcatgccaagcagaaaaggcttgaagagaaaaattctgtcgatgaagctgccactaagttcaattcaatgggaatatctattgcccatcaagacgctgaattacgtgaacaagaagaaaacgaaatgattatgaaaagtcacattaaaaacttaatgaccgattgtggaaaagctggaattatgacgtacaagttttatttgtgccatgtcaactacgcatttaaagtcggcgataagaagttcgctcctgctgaattagctttggtcgaattctcactttatgagggaatcacaaatagatttcacacttttattcatcctggaaaaattcctttggggctcagatacgaggcgatcgaatggtccaatatgtcacaccaaatacctgttgagggtggattgggtgaaaaattggataaaaatatcttcaactccatcatctcattcttaaatagcaaaggtagaaataaagcgttgccggttatttacacgatgccagattcgttaaattcaaacgattctatgaaggccgtcgtgagtgcttttcagcagttatgcgaggtggctgaagcagaccctgatattttccgcatttatgaattacctcatttgttctacgaactccgcaataaatccgtagaagacggccaagtggattatagatttccgagcgttgccttagccagagagcttttacaacgtcatgtttatagctcttgtagcaatatgggatgtgaatttcatgttcaaaatgactatgaattgaaatgctcattgagtgctgtgacccgatgggcatacgccatttgcgatcactgctgtcaatatttgggaattaaagttatccctggtgtacacatccctatccccaccctactgggtaacgaaggatattctgctgctgtgccttgtgtatcgccaaaaggcaatttgccaactcatgcttctcttcctgaacctgcggaagttcatgaacaattgtcttctgattgccctgatgaatcttttggatataaatatgatgaagacgatttccccggtttaggtggcaattcaaagaatgtaagaagtgaaaacgcccgttcttggggtaatccatggagaaaatgattctttttatattaaaacttttaataaataatttacctttctttatagacaaagaaatacatttattttaacttctgaattgtttaaaaaaa

SEQ ID NO: 212 - DNA, 1810 bp, Manduca sexta
tgctattaattttagctccttacgatttacgaattggcattttcaactaaaagttttacagctatatatttgaaatatatatttataattgaataagattaataaaggttgactttagacaattattctaaatttaaactggtaccaataggaagatgccgaagaaaccgccaagaaatgcattctactactacatgctggacttcagggaaaaccagaagaagttggacatcacttaccaaagtctaaaggaggtggcagaagctgcaggaccatcctggaagaccatctcaccaaccgcaaaagccaaatacgaagctatggctagaaaagagaggggtacaaaccagaagttcacatctactggtgtgcctctcgcgtatttggagcagcaacaaaaagaaatgcagcttgtggaggaggctgaactcaaagatatcaagaacattatcaatcttaagtgttttaatcaaagtattctggatgaagacttcttcctgttggatgtgattgagttgtgcaaagctggaccggactatctcattggagagttcactgtcttacagtttaacctgcgtgaaggcattaagaacagttatcacgagtttgttagaccagttagcgtgactatactgacctacggccttgacacgctggacgacagcctacccaaggagaactacgtgcagatcctggccaacatcatagactatctgaaacagaatgatcgtggcacgaacacactaccgcccatattcacaatgccagagaaagttgagccgatacagaattttatatggcagctgtgtaacagagctgccgaggacgacgcgttattccgcgtatacaagctggacacgatgttcttcacgctggccaacgcgattcgcagcggcgacaacgaggggttcccgaaggagtcgctcgccaccgcgcagctgaacaaggacttgttcaagtacacgcccgggttggcttgcgagcaccatgagaccgtggacaaaagcaacgagtgcacatcctctcgcgtgaagcgctgggcatacacaatcctggacgtgtgctgcccactgctgggcatcgccgcgcagcccgggaaacacgtgccgcacgacttcgatatagacagcatcctctcgtacaaggaagagaagcgtgaacgagcgctaccgagtgtagctcgtcggcaggtgccgcacgacagtatgtcgtcttgcagttcgtcgatcatcaacgacacagtcgacgattccaccgtgtatagctttaacgcctcccacaccagtgctccaaagggcaagaggacctacacgccgctgcgtatgccgaggactgattattcgcaacgtctccaacaagcccccgagctgaccgagacgaacttcccaacgctcggcagtacaggacacggcagaggtcgcggcctcgcgagcagtttcgatcggatgaacttgaagaagtaaataaaaattaagaataacttgcaatgtgccaacgtatcaacaagatttcattgtgaatttgtaataagctaaaataaatgactatttttctgtgttttatgaatctcggtgtttaagtatacatggtgctgtaaaagcgtaaatattgaacttttcagggcacgctgtataacgtagtagttgtgacattgtttatacgcacaaaaagaactatcaaaaaacttagtaaatatgtcttaagtcatatctaaatttgttccatcatcattgaacatattttgtaccagagtgaatagaggcacagtcataaactcgccatgttgataacttcatacaattggaaacgt

SEQ ID NO: 213 - DNA, 4514 bp, Spodoptera frugiperda
cgggaattgcacgaattgaaccggctacaaaaaaagacgttttgcgaaatagaaattattttgcgttgtgccttgactgcttagactgcactaagtgtctgcatctgcgaacgaaacctacccattgtactttgtaattaatcacctgctatattatttttttaattcaattcgactaatatgcctaagaaaaagaccgcctactggttcttcttacaagatttcaaagaagaacaaaggctaaaaggcattacgtatacggaaaaacaggaattggataaagatgccgataaagcatggaggagtctacctccttcagttcgtgctaagtacgaacaaacggcgaagaatgagaaggaaaaaaacaatgtaactgttataaagtatacgtctaatggcatcccgttgactgtgattgaaaaacaaaaacaagaacacgagatggcgcaaatcaatgaggttcaagatattacaaatataattaaaacgaagtccttcaaccaagaaattttagatgaatacttctacatcatcgacgtaaattcttattgtaagtgggatgacaaatatttgattggcgagtgtaccgttttgaggttcaatctgcggaatggtattcgagattattacccagtattgatcaaccctggagaaataccgatggggtacgcgtcggatgtaagagtggcgtgtatagagttagggctggacatgccggatgcagaatcaccgagtaacacgatggacatcctcgccaatatcatcgacttccttagacagaaggacctgaaggccggatctctaccgcctctgttcactatgtcggagaaagtactgcctactaagagcttcctggaacagatgtgctacacagctcatgaggatgaaatgatcttccgtgtgtatcgcctggagaagttgttgttccatctggtgaatagcctgaagtccgacaagtacgacgggttacctcatgagtctctcgcgctcgagatactgaagaaagactgtttcagatacagcgaaggactggcttgcagacaccacgcagccagagacaaggccacggagtgcacggactcgcgcgtgttccgctgggcgtacagcatcatggacgagtgctgcgcccccgcaggcatcactccccgctccgggacccacgtgccaaaggacatgaacatcgaaaaatacaagcttctaaggaaccctactcctagagctacagtcgctggatatgaggcggcaccatcgtcctccaacaccacggccaacgattctatgtgggaagggagctttgaagcctctctcgtcagtgagccgtcgggagcttggggtgaaccttctggagcttggggtgaaccttctggaagtcaggcggcgagtgcctggcctcaacccactggcattccgtcgtcggaaacctggccacaactccctggcagtgggccgtcgagtgcctggcctctaccttctggtagccagtcgtcgaatgaatggcccgggctccctcggagtcagtcgtcgagagcccgcggtcaacactccggcagcggtcgtggtggccgggaatctgagtctgggaggcgagggcgccgcacacacgagcctatgcgcatgccgcaagccgactattcccagaacctccaggcgacgagcgaattaatggagaaacacagtccgctcctaccaggccttggacgtggtcgcaatctagctggcagcttgagcaagatgaacatcaataagaaaaagtaaagcattgaatgccatttaaatttctaccctattattattatgtaatgaatctgatttactttgtaagtatagtgttgtcagatgggctgtgtttacaccgacttaggtggacaacacaaatatcatacaggaatatcgggaaaaaatacttggaaccagtggcggaataaattgacaacccggcaaagttctcagtaactcaattcttctttttatattaggagattgggctcatccgatgaatttgccacgggtctcgaatcatacagttactgcttaaaattctatttacattctacgactatagagctatggacaaaaagtctattgatttatctcttttttaatctataatccataaacaatattgacaactatcctacctcacaactatttgaccaaattgctttaatatcttaaatctattgacaaataactagtaatgtataaaaatattttcctctatcatattttcaaaagagtgtagtttaaatgaaactatatttttagacatctatcccctaatcttataaattaagccatgtaagtctaggaccattacattacattgaccaactttttccatagctccaattattaaccatacgtatctatagcacaatatagcttaacgatagctaagcccatctggctacacgaaaacatgattattttgtattacaatccgacgatactcaatcttttcagtctaactgctcaatgtatatgtaaataatgtggcaaacaataagtcatttatatatgtaattgactgattaggctacataggattgcctaaatatatttaagatatatagattgtattggtatgtaggtacttaataaggaaaactgaggaaccttaagactagtgaagtgtgatattaggatggtctaggagtgtactaagtacgttttgaaaagtcaaaattttgagggaaggctggtttattaacgtattgacattcgatgtcaataaattcattttatttggatttaatcctttaaacttacctacaatttgatacgggagtatcaaggtaggattaaaatttaaaataaaatttgaataatattcaaaattaaatggtttacttcattaattacccattaaagttaactcttcgagtcgtttgcattacgggtatttcgttgttccttttccgtaaaacattgagtatcgttggatttacttattaattaaaaactttttgatatttttataatgtgggatttatgctaatctccgtacattccgtattcatattgactgttggaaagccaatttgtaaacccggaattatcgtagatcccacatgtttagaatagttctgacaatcggaacttaaaaattctgaaagaaaccttttacacgtgttatattttacactatcgtctatcgttttagtaaaacttcgtgcagggttgacaaagagttagttataagtataattttgttgcttttcattgaaaacatattttatttaccctaagttttatataagttttcaactgggctaagaatgtgactacatttacataaaaataagaagaaattccaccaaagttctctcgtttgtctggtatagattcagtatcgaatggttaaatgacattacacatttattaaagatgtcttgagaaataatcagcatcttattaaaaagtataattaaataatgttcaatgttcatatatgtctattgtagtggttccagaattccccccaccgacctgtagtacgtagatgcagaatagacacaaaatatctcagatgttgtacgatttagctgaccggtcaatatagctcaccacgccaaatttttagtgccacctgtgctcaaaaacttaacctaatcagttggttatatcacgtattccttcagtacgagcattactttgtgatcgtcttaaatagtggtatctttgtctatctagtcggaatgaggcagttttctcattatattcagtagtatatagtttggacaaaatctcaatgttggtagtgtttagtatacgtaagaaagtctatataaatcgcggtgatttaaaaaaaaaaaataaccaaatgatgctttggtccagaacttgcctgagttccaaggcttcgaacatataacaacatgttcagtaaaatttaaattctttctgtgttggattgccgcgagtccagtgttacattcatagggatatacccttttaatactataagtactatcatagtgtaggtatcaataaatatgtattttgatatcgtatttattaatctcctttactcgttttgaaagcggatattatagaaaagggggtttataaacccaatttggacaagagatataattgacaatgtatgtttcccgtcgaaattattttgaatagtatttgtagttatataaggtacataatacctatatacaattttatatagttcttcgcatgtggcgttggtttatttaagggtaataactatataacataactacagtcatagatatcatatttacctatattcaaatataataaaatctttcaataaactatgtaatgttttctggctcaataatatttgaaaatggcaacctctaagtcaactagcgccacctatatattaaagcttaatatgtgtgatatgtatacgtagtagtgtgtttatggatataaaacctgtctgactgtagattacaaatatctattacgaattctatgtgtgatagccataggtacctatgtagtactttcaatgtgtgtttaatgaataa

SEQ ID NO: 214 - DNA, 2917 bp, Ostrinia nubilalis
aaaaatttggttggtttgcaaaaattcgcttgtgccggcaaatttattttgaccaccgtctcatattcgttatattgtaatattttacatactctctgtgttattctactctccgtgacgatacgatagccatttgagtagggcatttatttcaatatgccgaaaagacaagtaaggaacgcattttatttctatatgattgacttcagagaacaacaaaagaaaattggaattcagtatgggaacataagagaagtctctgaagctgcaggtccttcgtggagggaggcaccaccaactgtacgcgccaagtttgaagaaatggctcgccaagaaaaattgaaaagaaatgtacctgaccagaagtttacttcaacagggataccattttctgagatagaacgacaagagagagagttgcgtgaagcagaggaagccgagagagaatacattaataatgttgttaaactaaagtcttttaattcagaaattatacatgagtacttttatgtgatggatgtgaactactactgtaagttcaactcggattacctaataggggaatgtaccgctctacgcttcaatgttaaaaatggcatcaaagatcaatttcatactatgatcaacccaggtccaataccagttggatatgcttatgatgtcaaactcggagctcaagaacttgggctggatatgccggatgcaattacttataagacattgccatacatagacactttagccatcatcgtcgactacctgaagcatggccttccgacttctagcaagacagtaccaccgatttacacaatgccagagagggtgcaaccagtcctgaattttatattgcaaatgtgtgcaaagacaggtgaagacgacggcatgttccgcgtgtacaagctggacacgctgttctacacgctgctgaatggcgtcaagaaccgcggcgacgagggattcccccgcgagtcgttggcgctcgcgcagctgaagaaggacccattccggtacacgcccggcttggggtgccggcaccacgaggacatagacaaggctgcggagtgcactacctctcgcgtgaagcgctgggcctacaccatcatggacagctgctgccccgtggtcggcgtggacatgctgccgtcgaagcatgtccccggcgacttcgacctggacaccatcataaattttagagagcaaaagaaagaaagagctgggccgtcagtggctgtccctcggtggggggaaccttctaacgcctcagccagcgatatcaatcagtcttcgttcaacgagtctgctaatacttcagcctcaacttcagctccttcgacttcatcaaagaaggaaaaaaaagcccagcctcctctacgtatgccaaagacagattattcgcaaacccttcgcccagcgcccgagctcaccgaagccaacttcccaagtttctctgctggacgcggccgtggcttagcgagcagcttaaacaaaatgcatattggaaaaccaaagaagtaaacgtagacagtctacctttaatcttgtcttgacctgtactcaatcttgactgctaactttattttaagacttcctcttgtgctgtgggacttagatacaaatattctattaatgtttacacttcgtgtatctaatacacttaagtcaggacttgttacccttttaggattgtgtctacaaaattattgggcgagcttatatggccgacagggtatggtcatttaatgggtgaaagttcgatatggatatttctataatgcagctattcatcactatcgaatatgtatttagaagctaaattttagccatgtatgctcgctatcgtgcattatgggtgcataaaaaataaaattagtctcttgatatgacacctttacatttcggtcttggttcgacttttacgtgcatttatctgctatgtatgtctgatatggagcaaagcaagtattaataaaatatttcatagtaaataatagaatattcagtagtaaataaccgtatataatatacctaataatactatattcctgtgtataaagcttggatacattgtggtgaaatgaccctcagtgacgcacaacgctcgaactacttgacgccacgttgtcgcactgtgtcaagcatgacatagatttacttaacattttcctttatccgagataccacttcatttgtttcctagtgtgtccaatgttttaaattgactcaacaaaaagatttcaaaaattgtcgtagcgaatgattgttaatgtctctagtgtatcggcgttcaatgacttaagtatattgctatctctagatgattgtctatttcattgatcaaatatgagaatacatgattatgttttatgtcgatgtgaggttataagtaaatgaatagcatttagtattaaatttaactaaacatataaaatatgatattatctctacatgttatttgatgttgtaacaatcgatgtgataaataatattaagtcaaatacttttgtgattgctttagttatttaagcattagtgccatttccgcttcctcttctctgagatataattttcgaaagaaacaaaactatttttatatttcgtttattaaatctttaaaagaagtgtatcatatttttaaggttggccaagtagaataagttttaatgtaatcaccaaagtgatacttgatcttaatgttgatattatttcggttttttttacgataaagactctagcaaacagccggctagagtgtaatgtgaagtatacgtacttattgatagttagaacctaccgctttgtcgcactcgtgtgggctgtgctagaggctttagtaactaagtttcttatgttaaaatgttgaagtatttgtttgtacttgaatttatagtttcgtatgacaacttaatgacgattaaaa

SEQ ID NO: 215 - DNA, 1713 bp, Lygus hesperus
accaaagttcaaagcattgaatactaacgtcgttctgagcaattcaaagtcaaagagtgcatgaaactgctgcagatgtgtgtcctctggggacaccttgccctgacgtccaaactccccactacaccaaggataaggatcaaggatcgctaaggataacggaactccatttgaacagttgacttacctctctgcaatcatgggcagtaaaaacaaaggaaggaacggattttactacttcatggtagatttgcagaaagaaaaggctgacgatgggcacttctatagaatggatgagatgtcaggaattgctggcccactctggaagaatttatcgctggatgaaagggaatattacaacagaagggctaaggaagaaaaattaaaaggcgcctcggatatggatcgcaagtacaattctctgggagttagtttttcggtcgtcgaaggcattgagagagagttggacgaacaggagagagtcatgaaagctaccatcaggaatattgcacagtcctccagtccggaggcactcatccgaaaacctttttatttctgccacgtaaactactacttccaacccgataaagatagctaccaacctgcagaaattgctctcgcggaattcaccctggaagacggccttcgagagacgaggcatttcattctccacccaggtaaaatccctctggggatgaaagccgaggcacaaacctgggctgataaaactcacgggatccgactagtagacaagcctggcgaggaaatcgaacgtgaaggagacttcgtcaaagtattttcgaacattgtgaacttcttgaagaacgacgctggagtggggcagggaggagggggaatggtgctcccagtgatgtattccatgccggattcgctgaacaacaataccagtctgtctgctgtgaagtcctgcatgaacttcctaagtggatgtgcccatgagaatcgcgatctcttcagggtctacccgctaccagagttgttctatcatttgtggaagaagttcgagaagaagggcgacgaaacacccacggttgctgtcttggagaacgaagttgaaaaagacattttcagtggcgctgctgatttagggtgtgagttccacgaagcgaaggacctgagcctccactgcagtctgtcaatggtgaagcgttgggtgttcacagtatgcgatttcgtcaacaaaatgacgggtatagagacgattcctggatgtcacgcgcctgacaatgcggacctccaatgggctgccatacaatccagcaagcgcatgaacccagacgtgaaagttggatacgtcgatccaccaccgccaaaatctcctcccaagtttgttgatttgacgaaaatgcaggaactgaggatacgagaaaaagaagctgtggaagaagaactctcccaagccgaacgtcttccacctcctgtctctgctgtcttcagaggagggccgctccctcctaatctcaatgatagagatttccctcctattggaacgagtggtcgcggaatgtacctccccagatccaagtggccagcagtctcttcgcaaagagggaggcgtcagtaatgaaagtggaagaacctatttcgaaacctacgcgactttggttgattataaaccaatctaccctcgatttattgttcatttttcaattgttttattgtttattcgtgccagaatcgtttaggatattc

SEQ ID NO: 216 - DNA, 601 bp, Pectinophora gossypiella
tcaactttcagttcagttcgttcgttcagtcagttgattggaaaaaaaagttagttctaaaatctaaattatttttgaaggaaaaagttgatcaaaatgccgaaaaagccaccaagaaatgcattttactattttatgttagattttaaagaacaacaaagaaagaagggtataaactatgggaatatgaacgaagtagcgcaggcggcgggccccgaatggacgtcagcaaaaccacaagtgcgcgcgaaattcgaagcgatagcgaaggctgagaaggcgaaatcaaatgtgccggagcagaagttcacatcaacggggcagtcgctggccgagctggaggcgttggagaacgagcggcgcgcggccgagaaagccgaggagcgagacatcctcaactttgtcaagcagaagagtgtcgacggcagtatactggacgaggacatgtatctcatggatgtgaactactactgcaagactggatcctcatacctgatcggggaattggcactgctgcgcttctctatcagagacggcatcaagaacacttaccatgagatcattaacccaggtggcatccccatggggtacgcgctggacg

SEQ ID NO: 217 - DNA, 1396 bp, Diabrotica barberi
aaaacattcaccacatcaacacgtgaattaatattcgaaaatggagtacgaaaatacacaacaaaatataaacttcgtaccgtgtgtaagatgggttaaacgaggagtggccaattcaagcccagtaaaattgcaactgtcgaaaaacgagctggctcaaattattaatgacaccaagattaaattacaagaatccaatgaaaatgaagacgagcccatggaagaaggtgaaacgtctcaaacagatgagtttgccttagaggattacgataaagaagacgaaaatgaggacactgcaaatgctttaggaattggatcattggcagaactcgataatgatgctgcagacaatttttctgagtcagacgattctgaaaaagaagatgataaaatcaaaccatctgacaatctcatactagtaggacatgtagaaggggatgcaagtctattggaagtctacatatacaatgaacaagaagagtcattgtatgttcatcatgatattatgttatcatcctttcctctgtgtttagaaccgctaaactatgaaccgaagatgcccaaaggaaattattgtgcagtgggatcaatgtcacctgttatagaggtctgggatgtagatattatgaatgttattgaaccttcatttactttagggagacctgctagtaaaaagaagaacaaggaacatataggccatacggatgcagtgctttcattagcttggaacaaaacctttgaacatgtgttggctagtggatctgtagatcaaacaatacacttgtgggatatggaaatcaaaaaaccaagtacaaccattaaatccttccaagaaaaagttcaatgtctcgaatggcatcctttagaggcacaaacacttttaggtggaggttgtgacaaatctgcaagagtatttgatggcaggacccctgaaacccaccaaacttggctacttgatggagaagctgaaaggctatgctggaaccctttagaacctttcacatttttggcaggtaccagcagtgggtctgtacagtgtttcgactgtagaaaaggacagctatggtcagttaaagcacacagcaaggaagtaacagggttagtccttagcaaacaatgccaaggattgttgattacttcttctacagatgaaacagttaaaatttgggacttggctacactggaagctgaacctaagcttgttaatgaaaaggagtttaatatggggaatattcactgtttggatttatgtccagacttgccgtttgttatatctgtaggtggagataagaagtcaaataattttactgtttttgatgtacagaatattgatgttgttaaacacacatttgggccaagaggattggtacagctagttccagatacagaagaaaat

SEQ ID NO: 218 - DNA, 1402 bp, Diabrotica undecimpunctata
caaacatgtatataaaaacatatttcaacacgtgaaatattcgagaatggagtacgaaaatacacaacaaaatataaacttcgtaccatgtgtacgatgggttaaacgaggagtggccaattcaaatccggtaaaactgcaattgtcgaaaaacgagctggctcaaataattaatgacactaagattaaattacaagaatccaatgaaaatgaagatgagccaatggaagaaggtgaagcgtctcaagcagatgagtttgccttagagaattacgataaagaggacgaaaatcaggatactgcaaatgctttaggaattggatcattggcagaacttgataatgatgctgcagacaacttttctgagtcagacgattctgaaaaagaagatgataaaatcaaaccatctgacaatctcatactagtgggacatgtagaaggagatgcaagtctattggaagtctacatatacaacgaacaagaagagtcattgtatgttcatcatgatattctgttatcatcgtttcctctgtgcttagaaccattaaactatgaaccaaagatgcccaaaggaaattactgtgcagtgggatcaatgtcacctgttatagaggtctgggatgtagatattatgaatgttattgaaccttcctttaccttgggaaggcctgctagtaaaaagaagaacaaggaacatataggtcatacggatgcagtactttcattagcttggaacaaaacctttgaacatgtgttagctagtggatctgtagatcaaacaatacacttgtgggatatggaaatcaaaaaaccaagtacaaccattaaatccttccaagaaaaagttcaatgtctcgaatggcatcctctagaggcacaaacacttttaggtggaggttgtgacaaatctgcaagagtatttgatggcaggactcccgaaacccaccaaacttggctacttgatggagaagctgaaaggctttgctggaatccattagaacctttcacatttttagcaggtaccagcagtgggtctgtacaatgttttgactgtagaaaaggacagctatggtctgttaaagcacacagcaaggaagttactgggttagtacttagcaaacaatgtcaaggattgctgattacttcttctacagatgaaacagttaaaatttgggacttggctacattagaagctgaacctaagcttgttcatgaaaaggagtttaatatggggaatattcactgtttggatttatgtccagacttgccgtttgctatatctgtaggtggagataagaagtcaaataactttagtgtttttgatgtacagaatgttgatgttgttaaacacacatttggaccgcgaggattggtacagctagttccagatacagaagaaaat

SEQ ID NO: 219 - DNA, 1436 bp, Phyllotreta striolata
aatttcaatcgaaaaaacattgcacgtgaagtaaaacaaatttttcaatttcacaatggaaatagatgcacagacagaatcaaatataaacttcataccatgcgtaaaatgggtaagaaaaggtatagctaacacgaatcccgtgaaactccaactgtcgaaaaacgagttagtcgatataataaatgaaacgaaagtgaagctccaagaagctgaagaaaatgacgaggaacttatggaaagcgatgtaccgagacaagatgaattcaatctggaacaatacgatgaagatgaagccgaagaaaacactgcaaacgcattagggataggctcgttagctgaactagataatgcagccgaggataatttctccgagtccgacgattctgataaagaagacgaagtcattaaacctacagataatctgatattggtggcgcacgtagaaggagacgccagtttcttggaggtgtacgtttacaatgaagaagatgaatctttgtatgtacatcacgacattcttttaccatcatttccgctttgtctcgaacacttgaactacgaacccaaaatgcctaaggggaactactgcgcaataggatccatgtcgcctattatagaaatttgggatttagatattatcaatgtaatcgaacctagttttacgttaggtcaagtaaagacgaagaaaagcaacaaagttataggacacacagatgcagttttagcattggcttggaacaaaacattcgaccatgtaatagcaagtggatcagtagaccaaacaattcatctatgggatatggaaattaaaaaacccagtacaaccattaaatcgtttacggataaagtacaatgtttggaatggcacgctttagaagctcaaacgcttttagcaggaggttgcgatagttctataagagtatttgactgtagaactccagaagctcatcaaacttggctcttagatggcgaagctgaacggatatgttggaatccattggaaccttttagttttttggctggtaccagtaaaggttcagtccaatgtttcgactgcagaaaaggggaactgtggtctatttcagctcacagtaaagaagttagtggcctatgtgccagtacacaatgcccaggtctactaataacgtcttctactgatgaaacagtgaaaatatgggattataaagacctagcaaatgctccttgcctaataaatgaaaaggaatttaacttgggtaatgtgcactgcttagatctttgccctgatttacccttcgttatatcagctggtggagataaaaagtcgcataattttacagtgtttgatatacagaatattgatgttgttagaaacacatttcaaccgagaggcttaattaaatcagaatctgttaaagaagaaggtgcttctacctcaacttagagatatgcac

SEQ ID NO: 220 - DNA, 1420 bp, Phyllotreta cruciferae
aattaacctcaatttcaaaccaaaaacactacacgtgaaagaaaacaagtatttcaatttcacgatggaaatagacgcacagacagaatcaaacataaatttcataccatgtataaaatgggtaagaaaaggcatagctaatacgaatcccgtgaaactccaactgtcgaaaaacgagctagtcgatataataaatgaaacgaaagtgaagctccaagaagctgaagaaaacgatgatgaaattatggaaggcgatgagccgaggcaagatgaattcaatctagaacagtacgatgaagatgaaggcgacgagaacactgcgaatgctttaggcataggctcgatagctgaattggacaatgcagccgaggataatttctcagagtctgacgattctgataaagaagatgaagtcattaaaaccaccgataatctactattggtggcgcatgtagaaggagatgcgagcattttggaggtgtacgtttacaatgaagaagaagaatctttgtatgtacatcacgacattatcttaccatcgtttccactttgtctagaacacttgaattatgaacccaaaatgcctaagggtaactactgtgcaataggatccatgtcacctattatagaaatttgggatttagatattatcaatgtaattgagcctagttttaccttaggtcaagtaaggactaagaaaagcaacaaatctatagggcacacagatgcagttttagcattagcttggaacaaaacattcgaccatataatggcaagtggatcagtagaccaaacaattcatctatgggacatggaaattaaaaaacccagcacgaccatcaagtcgtttacagataaagtacaatgtttagaatggcactcgttcgaagctcagacgcttttagcaggaggttgcgataattctataagagtatttgactgtagaactccagaagcccatcaaacgtggctcttagacggtgaagctgagagaatatgttggaatccgttagaacctttcagttttttggctggtaccagcaaaggttcagttcaatgtttcgattgcaggaaaggagaactgtggtctctttcagctcacagtaaagaagttactggcctatgtgctagcaaacaatgcccaggtttgctaataacatcgtctactgatgaaacagtgaaaatatgggattataaggacttaacaaatgctccttgcttaataaatgaaaaggaatttaacttgggtaatgttcactgtttggatctttgccctgatttaccctttgttatatcagctggtggtgacaataagtcgcataattttacagtatatgatatacagaatattgatgttgttagaaacacatttcaaccgaggggcttaattaaatcagaatctgttaaagaagaaggtgcc

SEQ ID NO: 221 - DNA, 1282 bp, Leptinotarsa decemlineata
ttttttttaagtttcgtcaaaacatggaagaaaattcgcaaagtaacataaattttgtaccctgtgttcgttgggtgaaacgaggagtagcaaatgcaaatccagcaaaggttcagctatcaaaaaatgagttgatacagataataaatgatacaaaaaacaaactgaatgtggctgataatgaagacgaagtcatggaaggagaaccgtcaggaacagacgagttcaattttgaaaattatgatgaaaatgacgaggctagcactgcaaatgcacttgggatcgcatccttagccgatttacctaccggagcagaagataatttctccgagtcagatgattccgagaaagaagatgatttaatcaagcctacagataatctaattctagtgggacatgttgaaggagattccagtattctggaagtgtacgtatacaatgaagatgaatgttctctgtatgtccatcacgatatcgtcttgccgtcctttcccttatgccttgagtggctgaactatgagccaaacatgccggcaggcaattattgtgcagtaggtacgatgtctccaatcatagaagtgtgggacatggatatgatgaacgtaattgaaccatcgtttactcttggaaaagcaggcagcaagaagaaaaaccgcaagaggataggtcacactgatgctgtcctttctttggcctggaatcatacctacgatcatgtcatggcaagtggatcagtagacaaaagcataatcctgtgggacatggaacagaaagtgcccagcacaactattaacgtttttggggacaaggtgcagtgcctcgaatggcacaggatggaagcccaaactcttttggcaggtggttgcgatagcactgcaagagtctttgactgccgaactccagaacctcatcaaatttggcaattagatggagaagcagaaaggcttatgtggaatcctttggagccttacgtgtttctagctggtaccagcaacggctctatccaaagcttcgattgtagaaaaggtcaactttggtcaattaatgctcattctaaagaagtaactggtctggcgatcagtcgtcagtgtccgggtcttttggtgaccgcttctcccgatgaaatggtcaagacttgggattttgcatcaggaagcgtgccgaagcttgtacacgaaagggagttcaaactgggtaacatccactgtttggaactttgccccgattccccattcgttataactctaggaggggataataagtcgaacaatttcgccgtttt

SEQ ID NO: 222 - DNA, 1353 bp, Tribolium castaneum
atggaagaaaacgacaccgaaaatcgagttaatttcatcacttgcgtcaagtgggtgaagaaaggagtggcaaaaagccaacccgaaaaggtccaattgtccaaagccgagctcgtacaagtcataaaagccacaaaaaagaaacttcgagtcacaaatgaggaaaatgctcaaggtgaatcatcggctcaagatgagttcaatttggaaaattatgacgaacaagacgaaggcaccgctgaggctttggggataagttcactggctgatttacaaaataatgaggaagaaaacttctctgaatcagacgattcggacaaagaagacgaagttatcaaacctaacgataatttaattctagttggacatgtggaaggtgacgcaagttcgctagaagtgtacatttacaacgaggaggaagaatcactttacgtccaccacgatatcttacttcccgcctttccactttgtttcgaatggttggactacgaacccaacgccccaaaaggcagttactgtgctataggttccatgacccccattatccaagtctgggacttggacataattaactgcatagaacccgcgtttaatttaggccgagccgcaagtattaaaaaaaaccgacctcacgtcggccacaaagacgcagttttaactttggcttggaacaaaacctacgaacacgtcttagctagcggttcagttgacaaaactatacttttgtgggacttggagaacaaaactccaagtacgaccatttccgcgttcaaagacaaggtccagtgcatgcagtggcacaaactggaagcgcaaactttactagctgggtctagcgacaagaaagcaaaaattttcgattgtcgcaaccctgagacacatcagacgtggaaaataaatggggaggttgaaactctggtctggaacccgctacaaccgttttcatttttcgccggtagtgataccggaaatttgcaatattttgattgtagaaaaggtagtcaagtgtgggctgttgaagcccatgaaaaggaagtcactgggttggttgtgagtccgcaatgtcccggtttattagtcacatcgtcgccagatgggacgataaaaatttgggactacaccgaaaatgaagccactttcgtgttcgaaaaagattttagtttagggacagtccagtgcctggatttgtcgcccgatttgccgtttgtcatagcggcaggaggggataataaatctaataattttctagttcacgatttgagaaacatcgatgttgtaaaacacaagtttggagaccggcaattagaagaattagtcgcagaaagtacagaagaaagcatgaacactgattag

SEQ ID NO: 223 - DNA, 1435 bp, Epilachna varivestis
tataactaaaagtagcaatattgactttgagaattataaggcattgcataaataaataagaggtgatatcaatggaacacgagttggaagaagaattggaatcgcagagtagaattaattttataccttgtttaaaatgggttaaaaaaggtgttgccaacacaaatcctatgaaggttcaactctcaaagaatgaattggtaaaaattatcaaagatacacaaaaaaagctagtccttgccaaaaatgaatcaaatagagatggcgacgaagaagcagttgatgacctcaatctaagtgattatgacaatgaagatgaaaacactgctaatatacttggcatcggttctttggcggagttaacaaatgatgcacaagataatttctcagaatctgatggttctgatatagaagatgatttaatacttgtgggacatcttgagggtgatacaagcattttagaagtttatgtctacaatgaggaagaagagtccttatatgttcatcatgatatattattaccaagttttccattatgcttagaatggctagactatgaaacaaattcccctaaaggcagctattgtgctataggttccatggatcctataatagaagtatgggatttagatataatcaactcagtggaatcagcttttaaattaggacaaatgggtagtcgaaagaagggtcgaccccatataggacacagggatgcagtattatctttagcatggaataggtcattcgagcatatattagctagtggttcggcagataaaagtgtaatattgtgggatttggatagaaaagaacctagtactacaatcaaagcatttgaagataaagtacagtgtctagattggcataaattagaggcacaatctttattagcaggtgcttgtgatggtcgtgtaaaagtctttgattgccgaactcctgatagtcatttgacttggaatttagatggtgaatgtgaacagctctcctggaatcccctacagccatttactttcattgcaggcacaagtgtaggttctttgcaatgctttgactgtagaaaaggtcagttatggtcgattccagctcatgaaaaggaagtcaccggactctttgtgagtggtcaatgcccaggattaattgtcacatcttctccagatgaaacagtgaaaatctgggactatagtggggaaaattctcctgaattgattcacactaatgactttaattgtggaatgttacattgcttggggggttctccagattctccatttgtaatagcttcaggtggagataagaagtccaataatttcttagtttacgatatacgaaatatagatgctgtaaaacacaggtttgagggcagggaattagtacagctggttcctaccactccatcagaaactccagaggtcatgcaacaagatgattaatg

SEQ ID NO: 224 - DNA, 1432 bp, Vibidia duodecimguttata
gtatcctgtgtaaaatggatagaaaaaggaaaagctcgtgcagaacctttgaaggttaaaatttcgaaggaagaactggtagaaatgattaaaaatactaaggaacaactcagtctcagtaacttagaaaatcaagaaaatgaaccatcagatgacgttgatatggagaatggagatggtaataatgtggggttagatctcatcgatgacttatccacgaatcctgaagattatttgagtgaatctgaagaagaatccgataaagaggatgacatgataaaaaccagtgataatttggtacttatcggtaaatttgatggtgacgcttgttcgttagaggtccacgtttataacgacgaagaggtttcgttttattgtcaccacgatttcttattgacaagttttccggtttgtttcgaatggttgaattacgaggcgaacagtccgttgggtaactacgttgcagtcggtatgatggaaccggttatcgaggtttataatttggacgttataaacgttatgacgccttcgtacgaacttggacgaaaagctaacaggaggaaaaatttacctcaaatcggtcataaaagttcagttctttccctggcttggagtagagcgtacgaacacgttctagctagcggttcttccgataaaagtattattctgtgggatttggaaaagagggagccgagtactacgattaaatcgttcgaaggagacgttcagtgtctcgagtggcataaagtggagacgcaatctttattagcgggtgcatgtgatagtcaagtgaaacttttcgattgtaacagtccgagtagtcatttaacttggaaattagacggagaatgcgaaactttgaattggcatccgcatgagccgttcacgttcttagcaggcaccaatgttgggtctttacaatgtttcgactgcagaaaaggtctgatctggtcgttggctgctcacgagaaagaaatcagtggggtttttatcagtagcgaatgcccgggattaatgattacgggatctcatgacggcatggttaaaacgtgggattacaaaggggaggatgtacctgaattggtctattccaaagacttcaatttaggaacaattttatcccttgaaggttcaccaaactcacccttcgtaatagcagcaggtggcgacaacaaagataataattttgtaatatacgacgttcgtaacattgacgttgtgaaacacaagttcgagaatagggaattgaaaaaattggaaacttccacacctgccgagcagacatgaagagtaattaaaatgtaattaaaggagaatggaatggatataagagggagtgaatgtcattatgatgggctttcatgaaagtagattgagaagtgaaaatttatatttgttatattttgaataaatatagttaatttaaaaaaaa

SEQ ID NO: 225 - DNA, 1470 bp, Pectinophora gossypiella
aaaactcaaaagagtgaagtgagcacgtgaaatcaagaaaattcgtgaatttgcgcgttgtttcctccataataatggaagaaaattcgcccacggtcagcttgatttcatgcatgcattttgtacgccgtggcgtagcgaaatcggtgccagaaaagattgagcttacagaaaaagagttagagagcataattaagcaaactgctgaagatttacggcttactgagaatcctgaggacagcgaggatgaggaaggagaagcgggtgctagtgctgtcagagatccaccagcaaatcctaatgatgagtttgattttgaaaaatatgacgaggaagatgcaagtgttaacccaatcgggattggctcagtggctaccctacctaatttaggtgatttgagtgaaaatgtccaaatcaggactgaagggccagatagtgacgaagaagatgacataatcaagccagatgacaacttgcttctggtcggccatgttgagagtgatgctagcatactagaggtatacatattcaacaaagaagagggttcattctatgtgcaccatgacgttattctgccttggttcccgttatgcattgaatggctgagtcatgatccatctgatcctaatccaggtaatctttgcgctcttggtggtatggacccagtcatccaagtatgggacttggatattgaaaactgtctagaaccagcgttcaaactcgggaaaaagccgaataaaaagaaaaagataaaacgggttggacacaaagacgctgtattagatctatcttggaataggaacttcacacatgtactagcaagtggttcagcagacaatacagttttgctatgggacctggatcaaggggcacctcacacgacactcagctactttgaagataaagtacaatcgctaaccttccatccattagaagctcaaacattactatctgggagttgcgacgggcgcgcacgagtgaccgactgccggacaccagacgcacatcgcgcctggcaacttgcaggggagatagagagggtcacgtgggacaaacagaatcccttctgttttgcaatgagcaacaacgaaggcaaggtgtcgtacgtagactgcagacaagacgaacctctatggaccataactgcacatgaaaaagaagtcacaggtcttattctcagtgaacaagtgccagggctaatggtcacaataagcacagatggcaaacagaagacttgggatatatccaacgctccaccagtccaggtgagcgagcgaagcggccgcgtcggccaagcgttgtgcgcggccagctgcccagacgcacccttctccatagccgtcggcggcgacaacaaggaatgctgcatcgagatggtggacctcaccatcaacgaacaatttgtccaccggttcgggtcgcgacccctcgtgcaagtcactacagaatcaaatgacgacgcaatggaat

SEQ ID NO: 226 - DNA, 1361 bp, Spodoptera frugiperda
acagtcagcttaatatcatgtatgcactttgtgcgtcgcggagtggcgaaagcagtgccggaaaaaatagaattaacggagaaagaattggagaaaattatcaaacaaacagctgatgatttgaggatagctgaagctggtgatgatgagagtgatgaagaaggagaagcaagtgctgccccgagagacccaccagcagatcctaatgacgagttcaactttgaaaagtatgacgaagaagataatattaaccctgtcggtattggtactgtagctacattaccaaatttgggtgacttaagtgaaggggtacagataaggacagaagggccagacagtgatgaagaggatgacatcatcaaaccaaatgataatctgcttttagtcggccatgttgagagcgacgccagcgtcttagaagtatacatttacaacaaggaagaggattcgttctacgtacaccatgatatcattctcccgtggttcccgctgtgtattgagtggctcagccatgacccctcggatcccaatcctggcaacctctgtgccctcggtggtatggacccggttatccaagtgtgggacttggacatcgagaactgtctggagccagccttcaagttgggtaaaaaacctaataaaaagaagaaaactaaacgggtcggacacaaggatgctgttctagatctatcgtggaacaggaactttacacatgtgctagcgagtggatcagctgacaacacagtgttattatgggacctggatcaaggcacgccacacaccaaaatcgactgcttccaggataaggtacaatccctagcattccacccgctggaagcgcagacgttggtgagtggttcgtgcgacgggtacgcgcgcgtgtcggactgccgcgcgcccgacgcgcaccgcgcatggaacctcgggcccgagatagagcgggtcgtctggaactcacagaatccgttctgttttgctatgagtaacaaccagggtaaggtagcgtacgtggactgccggaacgacgcgccgctgtggacggtcgacgcgcacgagaaggaggtcaccggcctcatactcagcgaccgagtgcccggcctcatggtcaccgtcagcaccgacgagaaactcaagacttgggacatttctggtgcatcaccgcaacaagtaagcgagcgcacatgtcgcgtgggccaggctctgtgcgccgcgctgtgtccggacgcggcgtacagcgtcgccgtcggcggggacaacaaacagaactacatcgaactcgtcgacctcaccattagtgaacaatttgaaagtcggttcgcatcgcgacccctgctcataccacccactgcgcctagtgaagc

SEQ ID NO: 227 - DNA, 1482 bp, Ostrinia nubilalis
ctcgtgtttctcagcagaatcgcatgtttttttgctagtattttagattttatttataagtgaattacataaaaatggaagaaaacacacctacagttagcttagtatcatgtatgcattttgttaggcgaggtgtggctaaagcggttcccgaaaagattgaactaacggaaaaagaattagagaaaataatcaaacagaccgcaaatgatttaagattaacggaagccggagacgatgtcagcgacgaagaaggcgaaagttctcgcggcccaccagacccgcccgctaatcccaatgatgaatttgactttgaacactatgaccaagacgacacaagtaatccagttggtattggctcagtggcaacattacccaatttaggtgacttaagtgaaaatgttcaaattaggacggaaggaccagacagtgatgaggaggatgacatcatcaaagcagacgataacctgcttctagttggtcacgttgaaagcgatgccagcgtactggaagtatacattttcaacaaagaggaagactcgttttatgtccaccacgacatcattcttccatggttcccactgtgcattgaatggctgagccatgacccttcagaccctaacccaggcaacctctgtgccctcgggggcatggacccagtgatccaggtgtgggacctcgacatcgagaactgtttggagccggccttcaagctcggcaagaagcccaacaagaagaaaaagacgaagcgcgtgggacacaaggacgctgtgcttgatctgtcttggaataggaatttttcacatgtgctggcaagtgggtctgcagacaacacagtgctcctctgggacctggaccaagggtcgccgcacacaaaactaaactacttcgaagataaggtgcaatcggtgtcattccaccctctagaagcgcagacgttgttgacgggcgcgtgcgacgggcgcgcgcgcgtcaccgactgccggacgccggacgcgcgccgcgcctggcagctgccgccggagatcgagcgcgccgtgtgggacacgcagaaccccttctgcttcgccatgagcaacaaccaaggaaaagtagcgtacgtggattgtagacaggatgagccgctatggaccatagatgcacacgaaaaagaaatcacaggtctaatactaagcgacaaagttcccggcttgatggtcactgtcagtacagatggaaaaatgaaatcgtgggacataactagcggcgcatgcgtgcaagtgagcgagcgttcgggccgcgtgggacaggcgttatgcgctgcggcgtgtcccgacgcgcccttctctctggctgtgggcggggacaataaggagtgcttcatagaggtcgtcgacctgctggccagcgacacagtttcaaatcgcttcgggtcgcggccgctggtgtctataacggtggaatcaaacgataacgctatggaagcatagaatataattttgt

SEQ ID NO: 228 - DNA, 1604 bp, Manduca sexta
atagaaaaaagtcataaatctgtaacttccaaacttagtcacctatgattatactgtctgtgcatcattcattcaatcattgttctagttttaaatttgtttatggtctttatcagagtctttatcatttgtcaatgttatgttaacgtgttttgtctgggttatgtgcatgtgtttataaaataaatatatacaaattaaactagaaaatggaagaaaataccccaacagtaagcttagtatcatgcatgcgttttgttcgccgtggtatagctaaagctgtaccagaaaagattgaattgaccgagaaagaattggaaaagattattaaacagactgctagtgaattaagaatttcagaacagggggatgacaatagcgacgaagaaggtgaagaagctgcaagtgcgcctccagatcctcccgcagaccctaatgatgaattcaattttgaacagtatgatgaagaagatacaaatacaaatcccattggaattgggactgtggccacaatgcccaatttaggagacctcagtgaacatgtgcagatcagaactgaaggcccagacagtgatgaagaagatgacattatcaagcctacagacaacctgttgctagtgggacatgttgagagtgatgccagcatactcgaagtatacattttcaacaaggaagaaggatcattttatgtccatcatgatatcattctgccctggttccctctatgtatcgagtggttgagccatgacccttcagacccaaatcctggcaacctttgtgctctcggcggaatggacccagtgatacaagtgtgggatttagatatagaaaattgtctggagccagctttcaaactcgggaaaaaaccgaacaaaaagaaaaaaacgaaaagagtaggccataaagacgcagtgcttgacttatcatggaatagaaacttcacacatgtgttagcaagtggatcggcagacaacaccgtgttattatgggatctggaccaaggcactccacacaccaaacttgactacttccaagacaaggtgcaatcggtgtcgttccacccgctggaggcgcagacgctgctgtcgggcgcgtgcgacggctcggcgcgcgtgacggactgccgcgccgccgccgcgcaccgcgcctggccgctcgggcccgagatcgagcgcgccgtgtgggacacgcacaacccattctgcttcgtgatgagcaacaacgagggtaaggtggcatatgtcgactgcaggcaaaacgaaccgctatggacaatgacagcacacgaaaaagaagtaacaggtctcttattaagtgaacatatacctggtctaatggttaccgtcagcacagacggcaaaatgaaaacttgggatataacagggtctggcgctactcaggtgagcgagcgcgcgggccgcgtgggccaggcgctgtgcgcggcgctgtgtcccgacgcgccgcactcgctggccgtcggcggcgacaacaaggagaacttcatcgaagtcgtcgacctcaccattagcgaacagtatttgaatcgtttcggaagtcggcagccagtatccatcactacagaagacaactctatggaaacatag

SEQ ID NO: 229 - DNA, 1291 bp, Helicoverpa zea
ttttgatctcatgtgcacattgtttttgtacatgtgatcgaagataaatacatatatttaagttataaattttgctattacaatggacgaaacaacgccaacagttagtttaatatcatgcatgcacttcgttagacggggtgtggctaaagcagttccagaaaagatagagttaacggagaaagagttggagaagatcattaaacagactgctgatgatttgaggataacagaggccggtgaagatcagtcggatgatgaagacgaggctgctgcagcccctagagatccaccggccgaccccaacgatgagttcaattttgaaaaatacgacgaagaggatgatgtaaaccctgttggcatcggtacagtggctactgtaccaaacttaggtgatctaagtgaaaatgtacagataaacacagaagggcccgacagtgatgaagaagatgacattatcaagcctaccgacaacctgcttctggtcggacatgtagagagtgatgccagtatcttggaagtatatatttataacaaggaagaggattcattctatgtacaccatgacatcatcctgccatggttcccgctgtgtgtcgaatggctcagccatgacccaacagatcctaatcctggcaacctatgtgccctcggcggcatggacccagtcatccaagtatgggacttggacatagagaactgcttggagccagcgttcaagctcggcaagaaacctaataaaaagaagaagaccaaacgggttggacacaaggatgctgtgcttgatatgtcttggaataggaattttacacatgtgctagcaagtggatcagctgacaacacagtcctcttatgggacctggatcaaggcacaccacacactaaaataaaatgttttgaagataaggtacaatcagtatcgttccacccgttcgaggcgcagacgttgctctcgggcgcctgcgacgggtcggcccgcgtgtcggactgccgcagccccgacgcacaccgagcgtggtcgctggcgcccgagatagagcgggtcacttggaacgtgcagaatcctttctgttttgctatgagcaacaacacaggcaaggtagcatacgtggattgcagacaggactcacctctgtggacactggatgctcacgagaaggaagtcacgggactgatactgagcgagtcagtccccggactcatggtcacactcagcactgatcagaagatgaagacgtgggatatttctggagcggccccggtggcggtgagcgagcgcgtggtgcgcgcg

SEQ ID NO: 230 - DNA, 2976 bp, Megacopta cribraria
ggttacttttgaaaaggttatttatgtttgttataaatattaggtccatttattcattactaaaaatattttttttatgaaataccttggaacttgaagtttcttatcaaattctttttttggagggtgtctccgaatttaatgtttcttatatggacataaagattattataaaatggaagtagaaactgaaagacgtgtccttgctaaatttaagtctgataggggggaggaaattggtgcgttatatgacctaggaatttctgtcaatgttgagcaattgacttacatttgtaatagtctattggagcaggaggactctgctcagtacaccttttatgtgcatgatcaagaaatagtaaacactttagagggtgtcttggacgtacagaaactcaacactgaaaatgttgtcgaaattatttatcagcagcaagctgtttttaaagttagagccattaccagatgtacaagttctatgccaggacatgcagaagctgtaatttcagtcaaattcagtcctaatagtagacatttagcaagtggatcaggtgataccaccgtaagattttgggatttaactactcaaacacctctgtacagttgtaaaggccattctagctgggttctttgcatctcctggtcacctgattctaaaaagctcatatcagggtgtaagaatggaattattatattatgggacccaatatctggaaaacaaaagggtccattaatgaaaggacataagcaatggattacatcattagtctgggagccttttcacttaaatgcagaatgcagatattttgccagtagctcgaaagatggtgatatcagaatatgggatgcacctgtgggaaaatgtttacgagttctgactagtcattcaaaaagtgtaacatctttaatttggggagggtcttctcttctctattctggctcacaagatcgaacaattaaagtttggagacctaacgatggtgtcctctgtcgaacactggaaggacatggacattgggttaacagtctttgtgtgaacactggctatgttttaagtttgggatcatctttcaggccatctgaaaatattaacaaaaatgatgtcaaagcattgcaaaatgctgctcttgaacggtacaaagaagttatcggttcagaaggagagattcttgtgtctggaagtgatgattttactatgtttatgtggaagcctgaaacaaataaaaagtcttttgaaagattgactggtcatcaacaactgattaatgatgtaaaattttctcctgatacaaggattctagcttcagcttcatttgataagtctataaagctttgggatggaaaaactgggaaattcattaccaccctacgtggacacgtgcagtcagtttatatgttggcatggtcttctgactcaaggttgttagtttctgcaagtgctgattcaactttaaaagtatggaatatgaaaactaaaaaacttctgaatgatctgccaggacatgtagatcaagtttttgctgtggattggtctgctgatggtgaaaaggtcgcatcaggcggcaaagataaactgttgaaactatggcagtattaagaatgtcttccaggataacataggttcatagacttcaagttctctcaatgtatatattttttatatactttaacttttagctacttttaaaatgttaatatatactattattgagttttgtttattttttttttaaaaacgacacaaatgttttttagtcacccaaggggttggaaaaaacttccaatcaaatatttattttatatacaatatctatacaaagttgtctaatataaattatcagaaataaatttgttatattttgacaatgtatcaaataaatgctggggctttggtgccgataggggatcgacaaactggacagttttctttcatttcttctgagcagtcttcacacaaacaaacatgaccacatggtaaaataattatttcttttgggttttctctgcaagcaacacatagttcgttttctgataactctcttctatctctagcatttcgtctcctttctcttcttgtttcttctagtctcctccttttttcttcctctttcactttaagttctttcataacccaccattttctggccacaatgactcctagacctaatccaatgctcccaaaaagaagtgacaaccacttataagtcccttgttgctcttctaatttacgtattaaggaagatatcggcatagtggtaagataatatggatatcctgtcgatggaggggatatttggagattaccactagcattgatagaaacttctccaacagcgatgagaggagttccctctttcaacaattcttctgttgtttcaataccccgttgtcttactccattaaaaaatcctattatgtggtccataacacttagtgtactattctcaaattgattatagactgtgtccaaatccaataactctgcagaaacaggatcaaggatttcaattgaaaatttacccctctttaaaacaaaaggtaccacattatgcgatacatggataacatttttctgatctgcccaaaagccagaagcatttcgagcaatagcatgttccattatagtcttcctcaaaagtacgcctgagtaatcatgagagccagaacttttaactgttttaccaactgctctgacatctccttgatagattgtatatttcttttcttcatcagtcaattttttaatatcaggattcacaccaaggcgctgagcgcgttctaatagattaatggaccaactgcaatttaaatacaaccttgtgcatacccccacaatgacagcatcaatgcctaatgctataagttcacctaggaaatccattttataaatgcttgtaatacctttttttattcattaaaacctaagtattatgatccataaattttgtcattcgttaattcaaaacaaaaagtagg

SEQ ID NO: 231 - DNA, 3053 bp, Nezara viridula
gggggttagcaaagcacgtgtttggagagtataaatgctcatgtatttacttagtttgaagttgatgtttatgaggttttaaatcgaatttgtaaaaacacttctattttaagtattttaaattaatgcaatatcataatttatgatagattggttataatgttatagattgattatcacttttatcaaacttagtaaataagtttatatcaataatttataagttccattaaaatggaagtagaaactgaggaaaagcgtgtacttgccaaatttaagtcagaccgcggtgaagaagttggtgccttatatgaattagatatcaatgttaatgttgatcagttgacatacatttgtaatagcttactagagcaggataaatctgcccaatacacgttttatgtcaatgaacaagaaattgttaagaccttagaaggtgttctagatgttcagaaattgaatactgaaaatgtcgttgagattatttaccaacaacaagcaatttttaaagttagagctgttacaagatgtacaagctctatgcctggtcatgcagaggctgtcatttctgtcaaatttagtcctaacagtaagcatctagcgagcggctcaggtgataccacagttagattctgggatctcacaacacaaacaccactgttctgttgtaaaggccacaacaactgggtcctttgcattgcatggtcgcctgactccacaaaattagtttctggttgtaaggatggccacatagttttatgggatcccgccactggcaagcaaaaaggtcctactatgaaaggtcacaagcagtggataacctcgctggcatgggaaccatatcaccttaatgcagaatgcagatattttgccagcagttcaaaagatggtgatatcaggatatgggatgcaccgattggaaaatgcttgagaattcttactagccattcgaaaagtgtcacttcactgatttggggtggatcttctctcctttactctggttctcaagaccgtacaatcaaagtttggaggccgaaagatggtatactttgtcgtaccttggaaggtcatgcacattgggtgaatagcctgtcagtcaacactgactatgttatgcgattgggttcatctttcaggccatcagaaaatgtcaatcagaatgataaggaagctttaaagaaagcagctgttgagcgataccgtgaagtaagtggttctgaaggagaaattcttgtatctggaagtgatgattttactatgtttatgtggaaaccagaaacaggaaagaaatcttttgctcggttaacgggacatcaacaactcataaatgatgtaaagttctcacctgatacaaggctactcgcatctgcatcatttgacaagtctataaagctgtgggatggtaaaactggaaaatttataacaactcttcgaggtcatgtgcagtcagtctatatgatagcgtggtctgctgattctcggttacttgttagtgccagtgctgattcaacacttaaagtatggactatgaaaacaaaaaaactattaaatgatctcccaggccatgttgatcaaatatttgctgtcgattggtcggcagatggtgaaaaagtagcttctggtggcaaagataaacttttgaaactatggcagtattagttggccaagaagactacacttaaatgtaaatatgttttaagatgtatatacatgtatcgatggaagaaatattttttaactattaacaataaacaatacttcactccaattgtttttaaataccttacactttgttcctttcaaagttcttggtattaataaaagaaatacaactatttaatcgtctactgaacaaaatacaatgcccctaaaatcgatgccgaaataaaatttataatatatatatattttttttaattcattcatcatataaaagctgctgctttgctgacaataggcgatcgacagactggacaggtatccttcactccttcagaacaatcttcgcataagcagacatggccacaatgtaaaattattatttctttgggattgaccctgcatgcaacacacaattcattatctgatagttcccttccatctcgcgcatttcttctcctttccctccttgtttcttcaagcctcctttttttttcttcttcttttaacctcagttctttcagagtccaccattttttaacgacaattactccaagaacgactccaatgcttccaaaaaggagtgtcaaccacctatatgtgctttgttgttcctctaattttcttatcagagatgacactggcatggtggttaagtaataagggtaaccagcagatggaggagacatctgaagataaccactgtgattaaccattacttccccgatagctgtcagtggagttccttctttcaaaagttcttcagttgtttcaatacctctctgtcttactccattgaaaaaaccaataatatgatccataacacttagcgtactgttttcaaactggttatacactgtatccaaatctagtagctctgcagaaactggatcaaggatctcaatagtgaatttgcctttcttaagtacaaaaggtacaacattatgtgacacgtggataacatttttttgatcagcccaaaatccagatgcattacgtgcgattgcatgttccataatactccttctcaggatcacaccagaataatcttgtgagccagaacttttaactgattttcccacagctttgacatctccttgacaaatagtgtatttcttttcctcatcgcttaaattttttatttcaggattgattccaaggcgttgagctctttctattaaattgatagaccaactgcaattcagatataacctagtacaaacacccacaattatggtatcaatccctaaagcgataagttcccccaagaaatccatcacttttaattacattatttgagtctcattttaattatgaacaaaccgataagttaaattttgtcattgttttcaagttgatgcagtaaggttcagcaaaaacaaagacatgaaaaa

SEQ ID NO: 232 - DNA, 275 bp, Diabrotica virgifera
gctccaaagtatggtaccctagtgcctaacagaatattcgtgggaggaatatcagctaacacaacagaaggagaattgatgcaactttttagcaactatggtactgttaaagctgctaaaattatacaggacagggctggtgtgtcaaaaggatatggtttcatcacctttgagagtgaagatgatgctaaaaggcctcttagagaagctgaaaacatagtgctaagagaaagaaaacttaatatagcacccgctattaaaaaacagccttttag

SEQ ID NO: 233 - DNA, 275 bp, Diabrotica virgifera
tgccagtcaattcttttttcctccgggtgctgccgtgccatattttcagagtggagttacatattatactcagccagctcctgctgcacctggagatcccactgctcaacaacctgtttatcaaccccctccaatgtatcccacgcaaactggtcctccacaggcagctacatacccttctatgatgtttcctgctcaaactatatatatgccgcaacagtatcccatgcctattccgtacgagtacaacttctaccagggtaacggaccgtcgc

SEQ ID NO: 234 - DNA, 275 bp, Diabrotica virgifera
ctcagtatctggccggaggccaaagcggtccgggaaactctcattgcacctcattaccatcatcaaacagtccacccagacccaattgttatggtcaacaggtgcctgcctataattcaggagatcccgtgtactacaacttgccaatatacggagccactttggaaggtccgccattatacgctgatgccttcgatctaagcgctagtggagcttatgcggaggaaacctacagcggcatgattactcaagaaaatgtagaagcttctcttgga

SEQ ID NO: 235 - DNA, 275 bp, Diabrotica virgifera
cggtaaattcaactcgtgcaacttccgataattttacgcaacatatggatcaatctctcgttgagtctgattcaaatattgttaatgttggaggtaaaccaccagcacataaatcttcagagacaattgtttctactccttcccagcctcaggaggagagaaactcacacacgcctattgtttcactactttccatagatcatcaacaggaaaaagactattcatcaatgcaaagcggtcgtagacggaaacttctgattcaaagcaatcaaaat

SEQ ID NO: 236 - DNA, 275 bp, Diabrotica virgifera
gtacccatgtatcctacaaacggatacgtcaaccagtttgtcggatataatcctcaacaaccatccccaccttcattcggtccacctctctataacaacggctacggttattctgaatatcgtcgatttaacggatacccagatctcaggtcaaataataatagtaataaaccgaggagacgaatatacgaaaataggcggtcgaacgatcattctagccgttccagtcttcgcacagactcaaactcatcggctagttgtgttgacgaaaataa

SEQ ID NO: 237 - DNA, 275 bp, Diabrotica virgifera
cgaagaaaaaacttttcgaactactgttaacactcctccacctgccccatactcacctatgaccaatcatcaattcaaatttattaattacactaacacgaaaaacgtttataatcataagtacgctcacacgtttataatcataagtacgctaacaacaataattattataatagaacagctacacacaatgaccgatttaaacataccgaacctttagcgaataaaaacaataacagttccatttacccattaacaaataatttcctaaataa

SEQ ID NO: 238 - DNA, 373 bp, Diabrotica virgifera
tagccatacccaaagtaattctgattcccttccctcccaaaattcccaggtacatgtgacgactacgggtcagagcttcgtcccggcggctatccaagctcagacgaaacgcaacaagcgttctttgagaagaagcggtgccagtgccggaggcatcaacgaaatcggcgccggtgacgcccctttaccaggcgaagaatgcgaagatgtctacaagaagctggaaacgcttaagttgtaacgaaaaagtggtatcttttcttgtatatttttttctatttatttaagactgtacaataatgtaaaatactagaaatttaatgtaaactaaagaggaaaaatatataatacatatttattgaagatgaaaaaa

SEQ ID NO: 239 - DNA, 381 bp, Diabrotica virgifera
cgtttagtagtacatagagaaatcgcttttagttttaatcttttctgtgttggaatattgaacaaattctaatgattcgtaaaataacacttctgttaaaaaccaaaactgatagtttgttcaaaaaaagtacaatttttctgggcttgctactgaaataatgtgccatactctaattgtggaacaaattgtaggtatatgttgaaagtgaacaaataactaatgcttacaataatgtcgacatcaagtcaaaataatggtaaaaagagttcaagcagctctattgttaacaccccttccagtactcccattaccaatcttgcaaatggtagtagtagtacccaaggaacagcacatagttcacctccacctaataacaat

SEQ ID NO: 240 - DNA, 271 bp, Diabrotica virgifera
tgcccaaatcaaataaatctagaaatgcgttttactactttatggaggattttaaacaaagacaaggatttgcttgtaaatcgatgaaggatgtagcagatgctgcaggtccccattgggctaggatgtctaaagcagaaagaagaccttatgaagagagggcaaacaaagagaagggaggtttgagatatacttgggatggtcaatgcgttgaagatatagaaaggaggaacaaagctgaggacaataaaattgctaagatgaaagatga

SEQ ID NO: 241 - DNA, 275 bp, Diabrotica virgifera
cagtgggagagcgaatctgtagtgtcagactcctctacagctactttcaataatagctttccaggtctgaaatcgaaatggacattaagcaattctcaacctgtagaaactgactcaatgagccaaatgtcaggtcagagctatgcaagtgctatgggaactagaagacagttttctagtgcaatgggaaatagaggatctcaaagagagtcctctaacaattccaacaatggtgacactagtgattcgaataccgattattttaacagtcaatc

SEQ ID NO: 242 - DNA, 500 bp, Diabrotica virgifera
tatcgactgcaccttgaaatttgccaaagaaaattgtcgactccgagatgaaatgttcttcataatccatatcaatactttctgttaccatgccagtggtgatcggtattatcccgctgaaattgccatttcatgcttcagcttggaggatggcgttttgcctcaaaatgtgtttcataaaattattaagccaggtagactaccactggggtatgctagtgacgcaaaaaagcaatctgaagattcacatcaactgcctatccccttaactggtgacgacgacgacaatgtggaagaagtttatacagagatgaaagaatttatattatctaaaaccggagatactaagaaattccctcccttgtatgctaagaaagatattgttaaaatgttgcaacatgtgttagacacttggtgcgctgattttgatgagccgccattatttaaagtttattatttacaatatatgtttcaagtattaaaaaactcggtagctaacg

SEQ ID NO: 243 - DNA, 350 bp, Diabrotica virgifera
ataacgtatggcccttatattcaatggcagaaacggaactggataaggatctttattcccatactgttggaatatgttgtgaattccattctgttagtgaagcttgtcaattttgcagcaagtcagtggcagtacgacttgcatacacaatttgtgataattgctgttcgttcctagatattcctatagagcctggaagacacgtacctgatcaagcttttacagcatccagtttgagctcaagagcttcatcaaaagctagtttgtatacaggttccagtaaatcttctaagaagcagtcagttcgtgaagatgacaaagacactgttttatcgttttctagtgcctct

SEQ ID NO: 244 - DNA, 500 bp, Diabrotica virgifera
atttccggctcttggaaggggaagaggtatggccagaaatcgaagaaattgatcatttttgactgcaatgggtcttgttccacttcatgagattgttaaatgagtatgtaactgattacattaggcgacaatattttttttagtgtcagattatttgatgtaattgtccttttgacaattctttaatcattgatgttttcttctattgtggtgtttttagatgtcatatttttatgtatgtaaattggttttttatctaagtatagaatattacattttagtttaataagataccagtaaagtatattggtttaccagtcgcctaatgtaaactagtatatacatacctatattatttttctttaatagttttaagtcaattttgatacagatcacgagacagatattttttccgtctagtccgaattgcgttccgtttcttgggccttgtcgaattgcgtcccaaatattttgcttacctggccaccgataacgtctag

SEQ ID NO: 245 - DNA, 500 bp, Diabrotica virgifera
tccgaattgcgtttcatttcttaattagccaacccaattgcggtcagaagatagcttaataaatattagttaagcagggaaatacaatcaacgtaatatcaactaacagtttatttttattttagcaccgaatttataactaacacatttaacgaaattgtatcttgaaatttcacccctgttatactggttaattttctgttcgagaaaaatatatttgctggaggtagctttatctacatttctagaaatattttgtttaacagaatttatttttatataagaatcggtttgaatgcgctttaatgtttcaacaaacaaaaaaatattaggatgtggagacaaacaataatttttaaattttgaatgaaatcactcacaagaattagttgttctatatatagatgcgctattctttgcccaaatttgtggaggaaatgtgtagtcctcttcgatatacctttcaactagatagtttgcaaatgcgtcaactcgatgat

SEQ ID NO: 246 - DNA, 500 bp, Diabrotica virgifera
catctggtttttcaggcataaaatcttccacaaaacaatctccaacttggctcggaggaagatacattaggccaaaaatatgcttcagccatttacctatttctgagttctcgttcttatactcagaactcaaccccatattttgtactttacgccacctgtaacaagattatagaataaattctttatttcagaaagtacttgcattcaagaaaaagtttgaaacaggtcagattttataaaaaaaatacatctttaaaaaataatgagaatatttaggagccaattttttgacagaggttatgacgacatcttttttttatgtcaaaaatttgaagatattttacctacaattcttgttttaacttatatcaaatgctgttttttgtaaaaaaaaattgaaaaaagaaattacagtgaagtttgaaataaacatattgaaatgtttagttttacagcaaaaaaaataggatgacgtcataactcaagtttttcttaac

SEQ ID NO: 247 - DNA, 500 bp, Diabrotica virgifera
aatctactatttgccagttacattgccatacgtattacttaccaagcttgagcaagatgaagtcgataaccaacaacatttgcttccggaaaaacttctcgtacgctggagtggatacctaattcgtaatcaatcactattttcgttggatttaaattgcatcccaaatcttgacattttttctttaataattcgaataatgatttgtaagtgaatttttgcttattaggtaacaaacaaaatgcaaccggaacataagtgtcattaatcaatgtatgtaatgtaaacatttaaaaaaaaattgtgcaataatcgaatgttccatccataaataaagtggaattgttacacataaatgaaagattagacattcatgaaaaaacaaaaatattaaactgttcatcattaatcaacaaaaactgttcatttttgatagtaaatatttcaatttgttccaaaaattcttgaacatccttggctgattttggcaattttggaac

SEQ ID NO: 248 - DNA, 322 bp, Diabrotica virgifera
cgttttcaatcgcgtgcgattaatgttctttttttatgtattggacatcttttgttgacagagaggtaagtacttcgctttgcttttcgatttccttgtgtaacaacttcgcaggtcgttccgcaatatcttctgttgcttttcttttaagagaattgttaactttctggcgaattaatacttcttcagcaagctcatgattgtgttcaccactaacttttgaaaacacattatttaatgtatatagttttgctttacactttttgaagttatacttctttaggcgcgattgagtaattatttattattaatctgcgcgcat

SEQ ID NO: 249 - DNA, 272 bp, Diabrotica virgifera
tggagtacgaaaatacacaacaaaatataaacttcgtaccgtgtgtaagatgggttaaacgaggagtggccaattcaagcccagtaaaattgcaactgtcgaaaaacgagctggctcaaattattaatgacaccaagattaaattacaagaatccaatgaaaatgaagatgagcctatggaagaaggtgaaacgtctcaaacagatgagtttgccttagaggattacgataaagaagacgaaaatgaggacactgcaaatgctttaggaatt

SEQ ID NO: 250 - DNA, 275 bp, Diabrotica virgifera
tggaaatcaaaaaaccaagtacaaccattaaatccttccaagaaaaagttcaatgtctcgaatggcatcctttagaggcacaaacacttttaggtggaggttgtgacaaatctgcaagagtatttgatggcaggacccctgaaacccaccaaacttggctacttgatggagaagctgaaaggctatgctggaacccattagaacctttcacatttttagcaggtaccagcagtgggtctgtacagtgtttcgactgtagaaaaggacagctatgg

SEQ ID NO: 251 - DNA, 248 bp, Diabrotica virgifera
caccggcttacgtaataattaatttattcctttcatttgcaccatactatatattatttattgagtggacaaatgttaaaaagtaagtctggcagcgaacgtgttaatgaaacctagtaaaaggctccaacatttgacacttcttcatgcaacatgttctgttctgtgtcaatctaacctaacctaacattttcaaatacgaatatggaaacatttcaccacatcaacacgtgaattaatattcgaaa

SEQ ID NO: 252 - DNA, 272 bp, Diabrotica virgifera
tcctctgtgtttagaaccgctaaactatgaaccgaagatgcccaaaggaaattattgtgcagtgggatcaatgtcacctgttatagaggtctgggatgtagatattatgaatgttattgaaccttcatttactttagggagacctgctagtaaaaagaagaacaaggaacatataggccatacggatgcagtgctttcattagcttggaacaaaacctttgaacatgtgttggctagtggatctgtagatcaaacaatacacttgtgggata

SEQ ID NO: 253 - DNA, 486 bp, Diabrotica virgifera
tcagttaaagcacacagcaaggaagtaacagggttagtccttagcaaacaatgccaaggattgttgattacttcttctacagatgaaacagttaaaatttgggacttggctacactggaagctgaacctaagcttgttaatgaaaaggagtttaatatggggaatattcactgtttggatttatgtccagacttgccgtttgttatatctgtaggtggagataagaagtcaaataattttactgtttttgatgtacagaatattgatgttgttaaacacacatttgggccaagaggattggtacagctagttccagatacagaagaaaatactaatacgttttattgtttaataaagtttttattttatttatttgtaataatttcatgcttcttctttaagtaccgtgcccaaatattagtcattggtagattccttgacaatttgccgatactgttttcgattactgaacaattcatcttctga

SEQ ID NO: 254 - DNA, 600 bp, Diabrotica virgifera
ggggctttctgatttttgacagcttctatagaagtttatcaagatgttgatgccaaaaaagaatagagtatgtatttacgaatacctcttcaaagagggagtcatggtagctaaaaaagattaccatgccccaaaacacctcgaactagaaactatccctaaccttcaagtaattaaggctttacaatcacttaaatcaaaaggttacgtaaaggaacaattcgcctggaggcattattattggtatttgactaactctggcatcgaatacctccgcacattcttacacttacctggagaaattgtcccatctaccttgaaacgcccagcaaggacagaaaccacccgtcctagaccagctgctctcagatctgagacatctaaaccttcagaagaccgtgcaggatacagaaggactcctggaggccctggagctgacaagaaagctgatgttggtccaggaactggagatgttgagttcaggcaaggattcggacgtggacgggcaccacaataaatttattgataagttaatttttataaattgatcagccaataaaaagtttggttaaaaaaaaaaaaaaaaaaaaaaaaaaaaaa

SEQ ID NO: 255 - DNA, 1432 bp, Diabrotica virgifera
cagaatcttatctgtaaagataaactaattatctctattgactcacctcattttatacgtagcaggtgaaaatacaccattgtagtgaaaattattattagttcgatttataataagttcgattttttacgaaaatgacaagtatcgagactgtggggaccattgtcctgaaattgctgaagttggtgatcaatttgatatgtctcatcttgtaccgaaccggatatcaaggctacttcttgggagtaggaggaacctggaatctaaacgaagaaaaaaatcccgatgcagaaattgtggcttccggcgtattcgtaggatttatgatttacacattcgtctcgctgatcagcctttgcttcgctagtggagatcacaaaacgacattcactgatattctgatgaatatagtagggatttttatgtggatagctgttggagctacagctcttcattattggcttgggtacttgtccgaatacaaatacacgacaatagattctgaacgacaagttggtttggcgttaggagcgatgtgtataataaatggagcggtctatcttgtagacggagtactttccgcaatctttatcctcaaagccaaaatgcaataactttcatcgtaatataaatatatttatttaggttatatactttactttaagcagctcaagtataccgtgacatcccactcatacatcaatgtctataattgtttcatgacaaatcatttaatagtattttaaagcattcattcgttcaacaccttttttacatttttcaagtattatatcaatctttttaaagaattgtttggctattaaccggattcaatccatatagttccgtaaaataattatgcgttttaataattaatgtaattaaaaatagttagtatatttttgaaataaaacaactgccgcaacaaattagggagaatacttttgtctcctgtagttttatctgttatccaaagttcgattaaattgtttcaatttaatgtatttttccatataacgcaccaaatagtcttaaaaaaatagtgcctgttactacctaatactttctacgtatgccttatggttagtagtggctccaataggtgcattttacatttttcatgaaaattcaattcacattattttcctcccgttctcttcatattatatttatttattctttaatatagttttgggcgtgaagcccagtaaatacctatatgaagtatattgatggaactgccatgcttgatgggttttgtctgcaattaaaataaaaccaaaacaaacatttgtacagtattgtaaaattcacaatatttaggtagatgtttaaaatttaatattttttaagagtttgcatttatgttaatcgtagttaagtttttataaaaatttagtagttgtgagaaataaaataagtaaaagagaat

SEQ ID NO: 256 - DNA, 5689 bp, Diabrotica virgifera
tgttcatcaccaacgctgaccaacgtgagagtagcaactttttttgatgtgatgtgcgccagtttgtagtgccaaataaccaaaatgtggttcaagtactttgttatttttgttttgtttagtgttagcgttaaaggactagatggtgatcttccaccagatgtcgaaactatcgatgtggagactacgaatgtaagtaacgcggatccagacgcagggaaacctattccggtggaagatacgcctaatggagtccctccagtgaatacaaactatgaagtagataaatccttagttaatgtaaccaatagtttggtaaatgtgactaaaaatcccagacggacttatcagacagttaataaaatgggcaaatattcgacattttatgctgcagattacgatcctatgacctcagacacagctccaccagacactgaccaacgaggaggaggaggaactccatacactatatcagaaccgagactggcagaaataaggaaacattttatgtacccatttttcgataaaggaggcagtgataataacttgggagatttccaaaaggacattcaatcttccattcctcaggtgcacaagaatttaaacttccagttgcctttctttggattcaggtataattacacaagagtttcagtgaatgggtatctggaattcagcgatccacctccaaattatgactatccattagtatttccaattaaagaatggcccaaaaagaatgatcctgcctttattggcattttcttcagcagatgcagaatcggtaatctacgtgatggagacattgatcaaagaacacccggggtctattttagaatggaaagagatttaagaacgaggcaagacagaatgggtgtagaaattagagaaagacttaagtgggatatcagaacaggagtcattggatcagaaacattcgatcctaagcacgccgttattgtcacttggaaaaatgttactttcactggaggattcgctaatgctaaatacaagacaaacaccttccaaatggttcttgcaactgacgaagtcttcacttacgcgatgttcaactacctcaacttggactggacctcccacactgaagcgggtggtgattcccaaaacggggaaggtggtgtcagtgcctatgttggttttaacgctggaaacggtaccagaagctacgaatacaatccttacagtcaagcttccgtcattcgagatctcacatcagttggatttggaaatggttttaagggaagacatattttccgtatagacgaagacattttgcttggatcgtgcaacaaagatatagatggtgccaaccttcccctgaaattcgctcctgaaagtggtaacatgttgggtggaacagtggtaaatataactggtccatgcttcaatttgaatgataggattcgatgcaagtttgacgtatcaaatgaagtatttgggtatgttgttgataaaaacagagctatctgtgtacaacctcaactttatgccgaaggatgggtgaatcttcaaattgctgttaattccgaagcattcaagtggaaggggaagtattatgtagaatcacctgctagtgcgactcaaaaaatcttctttaaggacatgaaattacacgaaaaatctccgagcgaattaaaaatcacttgggagaagcagaatttgaccacaaacgacaacgctaacatccgaatttctctctggggttacagagaaacgactatgaaaccagtgtttgtttatatcaccgatatcgctgataatgttcaaaacattggagaacacacgattgttccttctcagtttagaactagagtcaatcaatatctgactgatattaagtttggattcctccaaattaatttaactgagtctatcacagttaatacatatactacaagccagagcagcatagaattaacaccggtaatatggagccgacccattccactcggttggtacttccagttccaatgggaaaaccagtacggtaaaaattggcccaaatatctatgtgacgattggctgagaacggacagatatctaaaaaacttcgcccacgaacttgctcaatgtccctgcaccgtcgaacaggctttagctgacaagggcaggtttatgccagacttcgattgcgacaaagattcgaacccgatttgttactataacaaccaagcacttcattgtgtgaaaactggatctcccactttagaaggctccgaacaacaatgttgctatgataaaaacggctttttgatgctctcttacgatcagcaatggggttctagtccgagacgttgccacaacttgggtaaaatgccttacaatgaagcgacaaaagtgcctactctctcacaatggtttaatgacatggtacccaaatatttgtgttgtctttggcaagacgagcaagctgtgggatgtgaaacactgagatttgaacggagacctacacaggattgtgtagcttaccaagcaccaggtgtagcaggagtctacggtgatccacactttgttactttcgacgatgtagaatatacgtttaatggaaagggagaattcgcattggtgaaatcagttacgcaaacggacaatctggaaatccaaggaagatttgagcaaatggaccctaacacttatggtgaggttagagctactcagctgacttctgtagtagctaaaggtaataacacaatagcaattgaagtcagaaggagacctctggattctagatggagatataggttggatgttatagcagataatagaagactttattttgatagaccctcactaaaattccagcacttccaaggtgttactatttacactccaagctacatccttaatcaatcagaagtcatcattatgtttgacaatggagctggaatggaggttgtcgacaatcaaggattcatgagtgcaagagtatttttgccttggtcgtttataaataaaaccataggcctttttggaaattggagttttaacaaagaagatgacttcacacttccagatggttctagagcagcaatagtgaataacataaatgacatggaaagggtttacaatgattttggttccaaatggatgttggaggatgtgttagatcctcaaaagggtagagcattgttccacagggaattcggaagaacttcagcgacttacaacaacaaaacgttcaagcctcaattcctaatgaatccggaagatttcctaccaaccaacagatctacagatcttaagcgaatatccgaaatatgtcctctaaagttgtacgaatgttactacgattacgctatgacggttgacagggatttggcgcattacaccaagaattataaagccacgatctatcaatataaagaaacgacaaggaggaaagttgtgtcttgcggagtactagaaacaccgagattcggacgaaagagtactttcctgttcgtgcccggtacgaaggttacctatgaatgcatccaagagttcgtgttggtaggtgatcagcggagagagtgtcaagcggatggaacatggaatattcctgaatacggatacacatattgcttacgtcagcaggaatactctcaacgacaagctggtttggcttccgggataattatggctattcttatcccgctcatcttgcttttcgtctacctggcgtatcgtttcttacaaagaaggcagaaagaaaaagaatctgaaaaattacaagagcaacagttcatggaatcacaaaggagagcccaagaagcagctactaagaaattaacagaagctgaatatgcttcagaagatgaagacagtaatgttacaagcacgggagcaaaagaaacaaccgtatactaacacctatagaatataatgattcaacctatgaattgtaatattttaaagtttaatctttgtcaaaactattatataaaataagtactatattatgttgtagttaatatttaataggacttttattttttattgtatttcagattatatttcatgcagagtgtgatttagattatatttcatgcaaagtgtagagtttcagatatagcctttttaaccacaacgtaatccgattcttatagtaaattcaacattatttaagatactttttcattgaattgtatacctatctaatcctgcaagacccacatatctttttcccaattaaaagagtaaataggaagatacgaaagcacaaagttaaaataaattaacgaatttcataaaacccagtagaaagctatgttctgcagttattatctaaattagaatactattaagtaaccatatcacccttctcaagtttacattaacatcaagatctactggtggcatccataggtaggtgcctactcgtatatttagtaaacaacagtttgttgatccatcaacttcttgttggtaagattcagctcaacgttgagggcaaccggcccttcttcttaaagttccatcttctatcagaggttggatatcataatgggtttggtcactatgttggctgctgctctgaatagttgtaataaactacagttaaaccattatctaaggttctttagccaggagatgcgtcttcttccttggatccttccttgcataataattctcagcaactcatatttttctcctctggtaatgtgacccaaatattccagttttctatgtttttatactgttcataatttctaactccttatttaaacgtcgtagcacttcaacattggtaatcctttgaacccactgaattttcaatattcttctgtaacaccacatttcgaacgcttctatttttcttatgtgttgtctcttcaacgtccaagcttccattccgtatagtaatatagaaaatatgtagcatcttagagccctcaatctgagaggcaactgaaggtctttgtttgtaagcagtgtcttcatttataaatgcttgccttgcagtttcaattcggactttaatttctttgctttggtcatttttgtcatcaacccaggttcccagatatttatatgtctaactttttctatttgggtttgctctctatcattaacctttcatttccatgttgtgtttttgagacaatcataaatttagtttttttcttgtttatttttagtccgtatcgaatgcaataatcgttaattctatttagcaattcttgtagcgatcccagggtgtctgccattataaggatgtcatcagcgaatcttgtgttatttactatttttccgtttatagagattctatcacttagctccgctatcgcttcctgaaatatggcttcactgtacacgttaaacagtagcggcgacagaacacaaccctgtcttactcctctctttatatcaatattctcggattcttgttcttctatctttatattggccttttgattccaatacagattgatgataattcgcaaatctcgtaaaaaagcagctctcatttaatttaacgaagaaccatgtgtaggaaacccatcagcagaatgtagcaggctctggttgccaataataaagaagtcagcaacaagaatataccaacattaacggattagtagaaagttggggtcacttcttcttttggcatgataagcctagatgggtctttgcctgtctggctatgttccattcagatctctcttgtgctcttctccattgtctgttc

SEQ ID NO: 257 - DNA, 2733 bp, Diabrotica virgifera
acactagtttcattaaaaactctagcttccggggatcaagtgcttttcaaaatctggagaaaactactgttttgcaggaagctagagtttttaatgaaactagtgtaaatccaagaaaatgtacaccgatactaacaaaactgttgtacttattgaaccagggtgaaactttaagtgccaaagaggccacagatgttttctttgccatgaccaaactgttccaatcaaaagatgtaatattgagaaggatggtttatttgggaattaaagaactcagttctgttgctgatgatgtcattattgtaacatccagtcttacaaaagatatgactggtaaagaagacatgtacagagcagctgctataagagcattatgcagtattactgatgctactatgcttcaagctatagaacgttatatgaagcaagctattgtagatagaaacgcagctgtcagttcagcagcactaattagttcattacatatgagcaaattagctccagatgtagtaaaaagatgggtaaatgaagctcaggaagcagtaaatagtgataatgcaatggtacagtatcacgcattaggtcttctataccatattaggaagactgataagctagcagtgacaaaattgatttccaagctgaattcaatgggtttaaagagcccttatgctttgtgtatgttgataagaatcactgcaaaacttttagaagaagaggaccaagagtcactcctcaactccccatatacaataatatttacaatgggcttaaggaacaaatctgaaatggtggtgtatgaagctgcacatgccatggttaacctgaagttcacgagtagtaatgtgctagcacccgctataagtgttctacaactattttgtggatctcctaaagccacactcagatttgctgctgttagaactttaaatcaagtggccaccacccaccctgcgtcagtgacagcttgtaatttggatctagaaaatttgattactgatcctaataggtcaattgctacactggccattactactcttttgaaaacaggtgccgaatcttctgttgacagactaatgaaacaaatcgctacttttgtatctgaaatcagtgatgaatttaaagtggttgtcattcaggcaattaaggtattagctttgaaatttccaaggaaacatagcacgcttatgaatttcctatccgccatgttaagagatgagggaggtttagaatataaagcatccatagcagataccattataaccctaatcgaagataatcccgaagctaaagaatctggtttggcgcatctttgcgagttcattgaagactgtgaacatgtttctttggctgtgagaatcttgcatttgttaggaaaggaaggacccaagaccaaacaaccatcgagatacatccgttttatctacaatcgcgtcatattggaatgtccttctgtaagagctgctgcagtctccgccatggcacaattcggagcctcttgtcccgatttgttagaaaatatccaaatattactttcgaggtgtcagatggattcagacgatgaagttagggacagagctacatattatagtaatatacttaacaaaaatgataaaagtttatacaacaattacattttggattctttgcaggtttcaattccttcactagaaagatcgcttagagaatacattcaaaatccaactgacgaaccatttgacattaagtccgtacctgtagcagcagtgccaacagcagaagaacgagaagttaaaaacaaatctgaaggactgctagtctctcaaggtccagtccgacctcctccggtgtctagagaagaaaacttcgccgaaaaacttagtaacgttccgggtatacaacagttaggacctttgttcaaaacttccgacgtcgttgaactcactgaatctgaaacagagtattttgtccgctgtatcaagcactgtttcaaacatcacatcgtcctccaattcgattgtctgaataccttgccagaccagcttttagaaaacgttagagtggagatagacgccggtgaaaccttcgaaattttggcagaaataccttgtgaaaagttgcactataacgaaaccggtaccacatatgtagtagttaagttgcctgatgatgatctccccaactctgttggtacgtgtggagccgtgttgaagttcttagtgaaagattgtgatccatcaacgggaataccagattctgatgagggttacgatgatgaatatacactggaagacatcgaaataacattaggggaccaaattcaaaaagtaagcaaagtaaattgggctgcagcctgggaagaagctgcagctacttatgtagaaaaagaggatacatactccttgaccatcaatacgctaagtggcgctgttaagaatattattcagttcttgggattacagcctgcggaaaggactgacagagtaccggagggtaaatctacgcacacattacttcttgctggtgtattcaggggaggtattgacatactagtaagagcgaaactagctttgggcgaatgtgttacgatgcaactaacagtcaggtcgccagatcctgacgttgctgagcttataacttcaactgtaggttaagtttaaaggctacgttaatgattatattgtattacaatttttccatatgtataaatattttgatttatttaaattttattagaaattaaacaattttaag

SEQ ID NO: 258 - DNA, 3829 bp, Diabrotica virgifera
gaaatttggcaggtagattccttgctaataatgcgataagtattgtatagagttataactgagcctaatcattgtgttttaaaaactatcatgttaactaagtttgaaacgaaatccgcccgggtaaaagggctgtcttttcaccctaaacgtccctggatcttaactagtcttcacaatggttgtatccaattatgggactaccgtatgtgcaccctcctagagaaatttgatgagcatgatggccctgtaagaggcatttgcttccacaatcaacagcccttatttgtttctggtggtgatgattacaagatcaaagtatggaattacaaacaaaaacgatgcatttttactctattgggtcatttagattatattcgtacaacattgttccaccatgaatatccatggatagtttccgcatctgatgatcaaactatcaggatctggaattggcagagcagaacttgcatttgtgttttaactggacacaatcactatgttatgtgtgtaagttttcatccttctgaagatttgctggtgtcagcttcattggattccactgtcagagtttgggacatttcaggcttaagaaagaaaaatgtagctccaggtccagcaggactagaggaacatttgaagaatccaggagcaactgatctttttggtcaagcagatgcagttgtaaaacatgtgttagagggtcatgatagaggtgtaaactgggcatctttccatccaactctgcctcttattgcctctggtgctgatgacagacaagtaaaattatggagaatgaatgattctaaagcatgggaagttgatacatgccgaggccactggcataatgtttcttgtgttttattccatcctagacaggaactgattctctcaaacagtgaagataaaactattagagtttgggatacaactaaaagaacttgcctacatacatttaaaagggaaaatgaaagattctggataatggcatcacatccaaacctcaacttgtttgctgctggacatgatggtggaatggttatattcaagcttgagcgtgaacgtccagcttacacagtacatggcaacctcctgtattatgttaaagaacgttacttacgaaaacttgattttaccacatctaaagatgttccagtcattcagattcgtggtggaggaaaaataccagtttataagatgtcctttaatccagctgaaaatgctgttcttctttctacaagaacttcaaacttggataatagcacatacgatttatatgtgattccaaaagagcaggagagagatgatcaagtaccagaagctgaaagcaaaaggtcttctggacttacggcattatgggttgcaagaaacagatttgccgttttggacaggactcatcaactaattatcaagaacttgaaaaacgaagtcaccaagaaggtacaaactcctacatgtgatgaagtattttatgctggtactggaatgctgttattaagagattctgaacatgttactctgtttgacgttcaacagaagagaactttagcacaagtgaaaattaacaaatgcagatacgttgtctggtcgtctgatatgtcccacttggctctcctttccaaacacaacgtgactatttgtaataggaaattggatgttttatgttgtttacacgaaaatactagagtgaaatctggagcttgggatgatacaggagtttttatttatactacaagcaaccatttgaaatatacacttaaaaacggtgaccaaggaattattagaaccctcgatcttccaatatacatcaccagagtaagaggaaaccagatcttttgccttgatcgtgaatgcaaaccacgggtattgacagtggattcaatggaatacaaattcaaacttgcattaattaatcacaaatatgaagaagttttgtatatggttagaaattcaaaattggtgggacaatctatgatttcttacttacaacaaaaaggttatcctgaagtagccttacattttgtaaaagacgacaaaactcgatttactttggctctggaatgtggaaatattgagattgctctagatgctgcgaaatctttgaatgacaaagcttgttgggatcaactagcacatgctgctctatggcaaggaaaccatcaagtagttgagatgtgttatcaaaggaccaagagtttcgaaaaattatcattcctatatctgattaccggcaacctggacaaattgagaaaaatgatgaaaattgcggaaattagaaaagctaaatcatctcaatatcatgctgcacttttgcttggtgatcttgaagagcgtgttaaaattttgaaggcttccaatcaactttctttggcctacttgacagctgctactcacggaatggtagatgaagctgaacagctgaaggaacaaattggagaaaagaaaggttttccagatgtagatccaaatgcaaaatttttgaagccacctcctccaattcaacaagcagaatccaattggcctttgttgacagttagtaggggctttttcgaaaatacggccgcagttgctacagcttctgctaacatgaaatctcttatggcggaacctgtggccgatatgggaatggaagaggcaccaggttggggagacgacgacgaactggagctggatccagaagagaagaaagctgaagctgctgcaggtggtggtgatggggaaggaggctgggacgttgaagatgaaggattggaaatacctgatttaggtccatcggttcctgttgaagcggagggcaattttgttcatttgcctacgcaaggtccatccccactggttacatggaccaaaaattcgcagttagttgccgaccacatcgctgccggttcatttgaatcagctgcgagattgcttcatgatcagttaggagtagtcgattttaaaccatacgaaagcttatttattagtttgtatagcagttccagaacagtttattcttggcagcaaaatataccgccatcatttagctatccgttgagaaattggaaggatgccaatgttaagaaccagttgcctgcttctggcgtgaaattgaatgaactagtcgccaaattacaggcttgctatcaactcactacaggaggcaaattcacggaagccatagaaaaatttcaaactcttcttctctcagtaacgttagtagtagtagagaataaacaagaaatatcggaagcacaacagttgttgaggatatgtagtgaatacatttgtggtcttcagatggaaactttaagaaaaactttaccaaaagcttcacatgaagaacaaaaacgtcaatgcgagatggcggcttacttcacacattgtaaacttcagcctatacatcaaattttaacactcaggactgctctaaatatgttctttaagctaaaaaattacaaaacagcagcatcatttgctaaaagacttcttgagctcggcccaagacctgaagtagctcaacaagctagaaagatcattcaagcctgtgataccaatctgaccgatgaattacagatgcagtatgatgaacataatcctttcaacctgtgtggtcattcgtatacaccgatttatagaggaaaagccgaagaaaagtgtccgttgtgtggaacttcttacttacctaaatataagggaacattgtgcaatgtttgccgggtagctgaagttggaaaggattgtattggactcagaataagtgtacatcaatttagataggttaaatgcattttgtatttggaaatgattaagtattgatatatttgagatcttattctcaggttagaga

SEQ ID NO: 259 - DNA, 1812 bp, Diabrotica virgifera
cgaagatccttgtcacgtcactgctttttcgtgaatggagagtacacgtcaacgtcatctcagtttggtttattgttgggtgtaatgtttaaataaaataattattattttgtaaacctgtgccattaaacaaataaagcgatggtgctaattgcagcagcagtctgcacgaaagcaggcaaaacaattgtgtctcgacaatttgttgaaatgaccaaagctagaatagaaggtttgttggctgcctttcctaaattaattcctacaggaacccagcatacatttgtggaaacagattcagtacggtatgtttatcaacccctagagaaactgtatatggttcttattacaactagagctagcaacatattagaagatcttgaaaccctccgtctattcgcaagagtgattcctgagtactgcaaatctttggatgaaaatgaaattgcagagaatgcattttcacttatatttgcttttgatgaaatagtggcattaggttatagggaaagtgtcaatctgtctcaaattcgcacatttgtggaaatggactcgcacgaagaaaaagtttatcaggccgtgagacagactcaagagcgcgaggccaagaatatgatgagagaaaaggcaaaagaacttcagagacagaagatcgaagcggccaaaaaaggagggaagacctcgtttggtagtagcggtggctttggcagctcgacaggttatactcctacgccatctgttggtgatgtagctaaccagacaaatgatgttaaaacttcttcatacacaccagcccctgcgcaaaaacctcggggtatgaaattaggtggaaaaggtagagatgtagaatcattcgtagatcagcttaaatcggaaggagaaaacgtcattactccaaacaaaaatagtatttcacagccaggaactaaagctccagctatcaaaactgacatcgatgatgttcatttaagattggaagaaaaattaatagtgagaataggtcgtgatggtggcgtacaacaattcgaattattgggacttgctactttacacattggagatgagagatggggtaggatacgtgtgcaattggaaaatcagaatacccacggtgttcaacttcaaacgcatcctaatgtagataaagaattattcaagctacgctcacagattggattgaaacaaccggctaaaccttttcctctaaatacagatgttggtgtactgaaatggagattacaaagtactgaggaagctctaattccactcttaataaattgctggccttcagaagcgggagatggtagttgcgatgttaatatagaatatgagcttgcccacactaatttggaactagttgatgtcaatattgttattcccttgccaattggatgttcaccaatagttggtgaatgtgatggtatgtacacacacgaagccaagcgtaatcaactggtatggaatttgcctctgattgatgccagtaataaaactggttctttagaatttaacgctcctagggccatacccgctgatttcttcccgctttccgttggattcaattcgaagtcatcctatgcgagtattaagattaccgaagttgtcctagttgatgatgattctcctataaaatattcagtggagaccgcactatatccagataaatatgaagtagtataatggggcagaagtaaagaatcacttgtaaaaattatataactaatattatatcttatatgcaacattgctttttgtacaaaagttaagtaacttgtctttattttatctatattaataaaataagtaagaaag

SEQ ID NO: 260 - DNA, 300 bp, Diabrotica virgifera
tgaagattcacatcaactgcctatccccttaactggtgacgacgacgacaatgtggaagaagtttatacagagatgaaagaatttatattatctaaaaccggagatactaagaaattccctcccttgtatgctaagaaagatattgttaatgttggaggtaaaccaccagcacataaatcttcagagacaattgtttctactccttcccagcctcaggaggagagaaactcacacacgcctattgtttcactactttccatagatcatcaacaggaaaaagactattcatcaatgcaaag

SEQ ID NO: 261 - DNA, 300 bp, Diabrotica virgifera
ttatgcggaggaaacctacagcggcatgattactcaagaaaatgtagaagcttctcttggatcatcggtaaattcaactcgtgcaacttccgataattttacgcaacatatggatcaatctctcgttgagtctgattcaaatattgttaaaatgttgcaacatgtgttagacacttggtgcgctgattttgatgagccgccattatttaaagtttattatttacaatatatgtttcaagtattaaaaaactcggtagctaacgataacgtatggcccttatattcaatggcagaaacgga

SEQ ID NO: 262 - DNA, 300 bp, Diabrotica virgifera
aagaagtttatacagagatgaaagaatttatattatctaaaaccggagatactaagaaattccctcccttgtatgctaagaaagatattgttaaaatgttgcaacatgtgttagacacttggtgcgctgattttgatgagccgccattatacgctgatgccttcgatctaagcgctagtggagcttatgcggaggaaacctacagcggcatgattactcaagaaaatgtagaagcttctcttggatcatcggtaaattcaactcgtgcaacttccgataattttacgcaacatatggatc

SEQ ID NO: 263 - DNA, 300 bp, Diabrotica virgifera
cgggaaactctcattgcacctcattaccatcatcaaacagtccacccagacccaattgttatggtcaacaggtgcctgcctataattcaggagatcccgtgtactacaacttgccaatatacggagccactttggaaggtccgccattatttaaagtttattatttacaatatatgtttcaagtattaaaaaactcggtagctaacgataacgtatggcccttatattcaatggcagaaacggaactggataaggatctttattcccatactgttggaatatgttgtgaattccattctg

SEQ ID NO: 264 - DNA, 300 bp, Diabrotica virgifera
ctaaaatgcccaaatcaaataaatctagaaatgcgttttactactttatggaggattttaaacaaagacaaggatttgcttgtaaatcgatgaaggatgtagcagatgctgcaggtccccattgggctaggatgtctaaagcagaaagaaaacttaatatagcacccgctattaaaaaacagccttttagtcgagcatttgatgcatccagtccacctgctgttgctgcaaatagtgccagtcaattcttttttcctccgggtgctgccgtgccatattttcagagtggagttacatatt

SEQ ID NO: 265 - DNA, 300 bp, Diabrotica virgifera
tttttagcaactatggtactgttaaagctgctaaaattatacaggacagggctggtgtgtcaaaaggatatggtttcatcacctttgagagtgaagatgatgctaaaaggcctcttagagaagctgaaaacatagtgctaagagaaagaagaccttatgaagagagggcaaacaaagagaagggaggtttgagatatacttgggatggtcaatgcgttgaagatatagaaaggaggaacaaagctgaggacaataaaattgctaagatgaaagatgatatcgactgcaccttgaaatttg

SEQ ID NO: 266 - DNA, 300 bp, Diabrotica virgifera
cagaaagaagaccttatgaagagagggcaaacaaagagaagggaggtttgagatatacttgggatggtcaatgcgttgaagatatagaaaggaggaacaaagctgaggacaataaaattgctaagatgaaagatgatatcgactgcacctggagatcccactgctcaacaacctgtttatcaaccccctccaatgtatcccacgcaaactggtcctccacaggcagctacatacccttctatgatgtttcctgctcaaactatatatatgccgcaacagtatcccatgcctattccgtac

SEQ ID NO: 267 - DNA, 300 bp, Diabrotica virgifera
aaacagccttttagtcgagcatttgatgcatccagtccacctgctgttgctgcaaatagtgccagtcaattcttttttcctccgggtgctgccgtgccatattttcagagtggagttacatattatactcagccagctcctgctgcaccttgaaatttgccaaagaaaattgtcgactccgagatgaaatgttcttcataatccatatcaatactttctgttaccatgccagtggtgatcggtattatcccgctgaaattgccatttcatgcttcagcttggaggatggcgttttgcctc

SEQ ID NO: 268 - DNA, 300 bp, Diabrotica virgifera
tcccgctgaaattgccatttcatgcttcagcttggaggatggcgttttgcctcaaaatgtgtttcataaaattattaagccaggtagactaccactggggtatgctagtgacgcaaaaaagcaatctgaagattcacatcaactgcctataattcaggagatcccgtgtactacaacttgccaatatacggagccactttggaaggtccgccattatacgctgatgccttcgatctaagcgctagtggagcttatgcggaggaaacctacagcggcatgattactcaagaaaatgtagaa

SEQ ID NO: 269 - DNA, 300 bp, Diabrotica virgifera
tacaacttctaccagggtaacggaccgtcgctgccaactcagtatctggccggaggccaaagcggtccgggaaactctcattgcacctcattaccatcatcaaacagtccacccagacccaattgttatggtcaacaggtgcctgcctatccccttaactggtgacgacgacgacaatgtggaagaagtttatacagagatgaaagaatttatattatctaaaaccggagatactaagaaattccctcccttgtatgctaagaaagatattgttaaaatgttgcaacatgtgttagacac

SEQ ID NO: 270 - DNA, 300 bp, Diabrotica virgifera
cattctgttagtgaagcttgtcaattttgcagcaagtcagtggcagtacgacttgcatacacaatttgtgataattgctgttcgttcctagatattcctatagagcctggaagacacgtacctgatcaagcttttacagcatccagtttgtcggatataatcctcaacaaccatccccaccttcattcggtccacctctctataacaacggctacggttattctgaatatcgtcgatttaacggatacccagatctcaggtcaaataataatagtaataaaccgaggagacgaatatacg

SEQ ID NO: 271 - DNA, 300 bp, Diabrotica virgifera
acacgcctattgtttcactactttccatagatcatcaacaggaaaaagactattcatcaatgcaaagcggtcgtagacggaaacttctgattcaaagcaatcaaaataacgtacccatgtatcctacaaacggatacgtcaaccagtttgagctcaagagcttcatcaaaagctagtttgtatacaggttccagtaaatcttctaagaagcagtcagttcgtgaagatgacaaagacactgttttatcgttttctagtgcctctcagtgggagagcgaatctgtagtgtcagactcctct

SEQ ID NO: 272 - DNA, 300 bp, Diabrotica virgifera
gtcaattttgcagcaagtcagtggcagtacgacttgcatacacaatttgtgataattgctgttcgttcctagatattcctatagagcctggaagacacgtacctgatcaagcttttacagcatccagtttgagctcaagagcttcatcaatgcaaagcggtcgtagacggaaacttctgattcaaagcaatcaaaataacgtacccatgtatcctacaaacggatacgtcaaccagtttgtcggatataatcctcaacaaccatccccaccttcattcggtccacctctctataacaacg

SEQ ID NO: 273 - DNA, 300 bp, Diabrotica virgifera
ttgttaatgttggaggtaaaccaccagcacataaatcttcagagacaattgtttctactccttcccagcctcaggaggagagaaactcacacacgcctattgtttcactactttccatagatcatcaacaggaaaaagactattcatcaaaagctagtttgtatacaggttccagtaaatcttctaagaagcagtcagttcgtgaagatgacaaagacactgttttatcgttttctagtgcctctcagtgggagagcgaatctgtagtgtcagactcctctacagctactttcaataata

SEQ ID NO: 274 - DNA, 300 bp, Diabrotica virgifera
gtacgacttgcatacacaatttgtgataattgctgttcgttcctagatattcctatagagcctggaagacacgtacctgatcaagcttttacagcatccagtttgagctcaagagcttcatcaaaagctagtttgtatacaggttccagtcttcgcacagactcaaactcatcggctagttgtgttgacgaaaataaaaacgaagaaaaaacttttcgaactactgttaacactcctccacctgccccatactcacctatgaccaatcatcaattcaaatttattaattacactaacacg

SEQ ID NO: 275 - DNA, 300 bp, Diabrotica virgifera
ggtccacctctctataacaacggctacggttattctgaatatcgtcgatttaacggatacccagatctcaggtcaaataataatagtaataaaccgaggagacgaatatacgaaaataggcggtcgaacgatcattctagccgttccagtaaatcttctaagaagcagtcagttcgtgaagatgacaaagacactgttttatcgttttctagtgcctctcagtgggagagcgaatctgtagtgtcagactcctctacagctactttcaataatagctttccaggtctgaaatcgaaatgg

SEQ ID NO: 276 - DNA, 300 bp, Diabrotica virgifera
agctagtttgtatacaggttccagtaaatcttctaagaagcagtcagttcgtgaagatgacaaagacactgttttatcgttttctagtgcctctcagtgggagagcgaatctgtagtgtcagactcctctacagctactttcaataatagtaataaaccgaggagacgaatatacgaaaataggcggtcgaacgatcattctagccgttccagtcttcgcacagactcaaactcatcggctagttgtgttgacgaaaataaaaacgaagaaaaaacttttcgaactactgttaacactcc

SEQ ID NO: 277 - DNA, 300 bp, Diabrotica virgifera
tacaaacggatacgtcaaccagtttgtcggatataatcctcaacaaccatccccaccttcattcggtccacctctctataacaacggctacggttattctgaatatcgtcgatttaacggatacccagatctcaggtcaaataataatagctttccaggtctgaaatcgaaatggacattaagcaattctcaacctgtagaaactgactcaatgagccaaatgtcaggtcagagctatgcaagtgctatgggaactagaagacagttttctagtgcaatgggaaatagaggatctcaaag

SEQ ID NO: 278 - DNA, 2587 bp, Diabrotica virgifera
aaaacttctatcacacgtcctgaattgttataatatgagtaatgcacccaaccaaaatggatcaggtctagagcagcagtttgctggtctggacttgcagagtcgcagctcgaacagcagcggccgttacgtgcccccacacttgcgtaataaacaaagtcaacaacagtcgccatctaccgacaacttcgataaggatcgttacgacaatagagatcgtttcgacaacagggacagagacagagatcgcggagcgccagattcaagagatagaggcggcagccgaggaagcaacagaggcttcggcggtggcagcggcagggacaatagagatagtagagaaaacagagatagtagagatagtagggacagcagatctggagatttctccagttttaatacaagaaatagaagagattatcaaaatggagaatcttttgaaagaaatgaatggggtagtagccgcaataacgacagggacagggaccgtaacgccgacgttcaaccacgcaacgatcgctggcaggagccggaacgtcctgcgaggggtagcgagagccgagacggtggtagcggaggacgatggaacgacaacggaggcggcggtggtcgctggagcgaaaaccgccgcaacgtctcgtccgaaaacgattggactgtccctctatccagggacgaacgtcttgagcaagagctcttcggtactgggaacaccggaatcaacttcagcaaatacgaagatataccggtggaggcgacgggagacaaagtgccgcgtcacattacatcttttgaggaagtacagctgacagaaataattcgcagcaacattacaatggctcgttacgattcccccactccggtacagaagtacgcgataccgataatcatatcgaagagagacgttatggcgtgtgcacagaccggatccggcaagacggccgctttcctggtacccattttgaatcagatgttcgaaaatggcccgccaaacatacaacaaggaagaagtagacgcaagcagttccctctaggattggtccttgcaccgacgagagaattggctacgcaaatttatgacgaaagcaagaaattttcttatagatcaagagttcgaccatgtgtagtttatggaggcgcacatatcggtgaccaaatgcgcgaactggaccgcggctgtcacctccttgtcgcaacccctggtcgtttgctcgatatgatcgaaagaggacgcatcggactggattattgccgttacttggtgctagatgaagctgacagaatgttggatatgggatttgaagtgcaaatcagacgtattgtcgaaaaagaaaccatgcccaaaactggggagagacaaacacttatgttactcagccactttcccctcacctatacaaatgctagccagagatttcttggacaattatattttcttggctgtaggaagagttggtagtacttccgaaaatattacacaaaaggtggtctgggtagaagaacacgacaaaagatcgttcctattggatttactcaacgttgcagatttacaacaaccttcaccagaaagtttgacactggtttttgtcgaaaccaagaaaggtgccgactctttggaagaatttttacatattgaaggatacccagtgacatccatccacggagaccgtagtcagagagaaagggaagatgctctgagacaatttagatcaggaaacactccaattttagttgcaactgctgtagctgccagaggattggatattccacatgttaaacatgttattaatttcgatttaccatcagatattgaagaatatgtacacagaattggtcgtacgggtcgtatgggtaacctcggtcttgcgacatcatttttcaacgatcgcaacagaaacctggctagtggtttgctagacattttgatcgaagcaaaacaggaattccccagttggcttgaaggcgtagcagccgacggaagagctcccagtgccaatagaagaggtggcaaaggaagatatggcagtggtggaggtagtttcggtagcagagattaccgtcaaacatctggtggcggtagccaaagaggtcaaaggtctggaggtagcggatatggaaataatggatacggtaatggaggtagccattatggaggcatggatagaggaagcaactttggaggaaattacagcaactctactaatcgtgatgactggtgggagaaagaataagtcacttcaataattgattagaataaaattacttaacacgtacctactaccaccaattcgtacatctagtaatccaataactttcaatgtccgtgtttttcttctacccttcccgcactctctccgataatatttattccttccgaagttttatttattatcagaaatcaatttccttgacgcttctagtaatcccaacaaacacacacactacgtttgcgtgagtgataatgtgttttttatttaatttcaaacaactttatgtctcttgtataggaaacttaatggaaataatagggaaagtatcgttaagagtacgtgtatgtttttttttattttttacgagaagtttgtga

SEQ ID NO: 279 - DNA, 669 bp, Diabrotica virgifera
ggggacccattttaagatcgtaaggcgcaatctagagtattataaatctatgactgagaccaagctttctctgtttacagttaattttcattttaataattgactccacgtagaaactaaaaaaagaacaggatcgtttaaaaaatggcagatttttacattagatactacgtaggccacaaaggtaagttcggccacgaattcctcgagtttgagttccgaccggatggcaaactccggtacgctaacaactccaactacaaaaacgatacaatgatcagaaaagaagtgtacgtacaccaatgtgtaatggaagaactcaaaagaatcataatcgactcggaaataatgcaagaagacgactccttgtggcctcctccggaccgtattggaagacaagagttggagatcgtcatcaaagatgaacatatctcgttcactacctccaaaactggctctttaatcgacgtgagtcagtccaaagatcctgaagggctgagatgtttctattacttggtgcaagacttgaagtgtttggtgttttcgttgattggtctacattttaaaattaagcctatataaagtgtaaaatgtatttatctttgttaccttattataactcaataaaactctcagtttgtaagtaaaaaaaaaaaaaaaaaaaaccgg

SEQ ID NO: 280 - DNA, 1743 bp, Diabrotica virgifera
acatagttatattttcggtcgtaacatgtctaaagaagaagatgtacaggtgatacccgatataatttatgatgttcacacaaagacttattacaagaaaggaaagttttatggaaagggtggatttgcaaaatgttacgagctgacaaactcccagaacaaccaatcctatgcaggcaagatagtttccaaaacgttgatgcaaaagcaaaatcaaaaagaaaagatgacccaagaaatacagattcaccaatcacttcgacacaaaaatgttgtcggcttccataatttttttgatgacaatcacaacatttatattatattagaattatgtagaaaaaagtcaatgatggaacttcacaagagaagaaaagccctaacagaaccagaaactaggttttatatgaaacagatattatctggagtgcaatacctccatcaggcaagaataatccacagggatttaaaattaggcaatttatttttaaatgataatctgatagtaaaaataggcgatttcgggttggcagccaaaattgaatatgaaggggagagaaaaaagactctgtgtggaactcctaattatatcgcccctgaaattttaacaaagaagggtcattcctttgaagttgatatttggtctattggctgtattatgtataccttgctaatcggaaagccgccttttgaaactaccactttaaaggaaacttactctaagattaagaaatgtgaatataaattatctccaaacatttcttcatcggcacagcaaatgataatattaatgctacaatcagatccgaagaaccgtccaaaagtagacgcgctaataagacacgattttatacaaaatggttattgtcctcccagtttgcctgttagtgcactcacaatggctcctagatttgaaaattgtgatgtggctcctcgtagggcactgatggaaataaataatggagaaccgatgaatgtttccccacataagaaacacaactccattactgcaggattagtaccatcaggaaatccaacaaaagcatataccaatttcgaagctaaagaaaatttcatggcattgaaaggaatgctagttgcggtgttaaagacgaaaccaggtagacaaagagcattttctgatgagatgacagacccttctgcccaaccgatggtttgggtttcgaagtgggtagattactcggacaaatatggatttggctatcagttatctgatgattgtgtaggggtcatgtttaatgataccaccaaattgattatgttagcgaacggaataaatgtgcattatgttgataaaaatggtgacgaatcatacatgacggtagataattaccccaaacagcacgagaagaagatgaaattgctgtcatactttagtagatatatgagggagcatctcttaaaaacaggtgctgccgtagtgaaagaaacagattgcatgtcgaggaccccacatttgcaccagtggtgtagatcaacatctggtgtactaatgcaattaaacaatggcactgtacagatgaattttggtgaccacacaaaaatcataatgtgccctctattggctgcaataacgtacatagaccaagatcgagctttccgcacttacaaatttgaatcaattgaaaagagtggctgtccagttggtttatatgaaaaaatgcgatatgcatttgagaagatcacagtcctattagaaagtcagtaggttctatctactttttt

SEQ ID NO: 281 - DNA, 687 bp, Diabrotica virgifera
ggggggagtagtcggtatgtatttgaatttatcttaatttgtttaatattagtagttaaataggaaactatagttagaagttgttatatatttgactattagttgactccccaaaatgcagatcttcgttaaaaccttaacgggtaagaccatcactcttgaggtcgagccctcagatactatcgaaaatgtgaaagctaaaatccaggataaagaaggaattcccccagaccagcaacgtctcatcttcgctggaaaacaactcgaagatggtcgtaccttgtctgactataatattcaaaaagaatcaacccttcacttggtgttgagattgagaggaggtgctaagaaacgtaagaagaagaattactccacccccaagaaaatcaagcacaagaagaagaaggttaagttagctgtattgaaattttataaggttgacgaaaatggtaaaatccaccgattgagacgtgaatgccccgctgaacaatgtggagctggtgtcttcatggcagccatggaagacaggcattactgtggcaagtgcggttacactcttgtcttctccaaaccaggagatgagaaatagatatatgtccttgtatattgtttaagaaaaaaatagaaaaacctttgtttatttgaataaaatattcgaggaaatatatctatttctcatctcctggt

SEQ ID NO: 282 - DNA, 2068 bp, Diabrotica virgifera
tgtgaagtgtcaaaactgtcaaaagaattatgccaatgtcaaaagtgtaatttggaggggtgattataaaattattcttagacattacaatatttcatataaagtatttatttaaaagatgtatttgtgactggaaaaggaaattagagccctatacttacagttaaacgcttataaatttgtagcaagtattttatctttacaaaagaaagtttatttcttaacattgtagttttatatttttattacaaatggcaactggaactactttgcaaaaagccattgagttagtcaccaaagccaccgaagaagacagaaacaagaattatgaagaagcccttcgtctatatgaacatggagtagagtactttctacatgccattaaatatgaagctcagggtgacaaagctaaggagagcattagggccaaatgtgtacagtatctagaaagggcagaaaaaattaaagaatctgtaaggaaagggaagaagaagccagttttagatggaggttcttcaaaggaagacaaaaagagtgatagtgatgaaggtgacgaagatgatcctgacaaaaagaagttacaaagcaaactggaaggggccatagttgtagaaaaaccacatgtcaaatggagtgatgtggcagggctggaagctgccaaggaggctttgaaagaagctgttatattacctattaggtttccccatttgttcagtggaaagagagtaccttggaaagggattttgttatttgggcctcccggtactggtaaatcgtacttagccaaggctgtagctacagaagcaaacaattcaacatttttttctgtttcgtcgtccgatctcgtttccaaatggttgggagagtcagaaaaattagtcaagaatcttttcgaattggctagagcccacaaacctagtattatattcattgatgaaatcgattctttatgctcatcccgttccgacaacgaatcagagtcagccaggagaatcaaaaccgagtttttggttcagatgcaaggtgtgggccacgatactgaaggtatccttgtcctcggtgctacgaatattccgtgggtattggattctgctattcgaagaagatttgagaagagaatttacatacctctaccagaagaacctgccagagccgttatgtttaaattgcatttaggaaatactcatacagagctaacagatgaagatattaaagagttggcatctaaaaccgaagggtattccggagctgatataagtatcgtagttcgtgacgctcttatgcaacccgtccgaaaagtccaaactgcaactcacttcaagaaggtcagaggtccgtcgccgcttgatcctaataccatcgtagatgatttgttgcttccatgttctcccggagatccgggagctgtggaaatgtcttggatggatatctccagtgataaattagctgagcctcctgttacagtgaatgacatgctgagatcaatcgcaacctccaaaccaaccgtcaacgacgaagatctcacgaaactcaaaaagtttatggaagacttcggccaagaaggataaaatttaggtatacaccagatttactatttaaaagagagattcttgtataatatttgtattcttttaatgcatatatagatcgtaaaaaccacacaaaactttcaacattttgcattaagtgttattagaaaacaaaagattaatgttgttatactgttgctttaatattatttttttaataaattgaatttttcttttttatattacggccttattatacagtaagatagtatatatttgtattcttaatgataaatgaagttaatgaaacatgtttttagaatattcacttgttctttgtatataaaataataaaacaccgattggtttaaaatacttgtattggcttaaagcaagttatctataagcttcaaagacatactcagtgtcttatccgatttctgttactataaacgatctgattcatttatttatctgttgtaattaaaatctgaaataaaatgtcacaatatgtagattgttttccaccttaggattgg

SEQ ID NO: 283 - DNA, 5401 bp, Diabrotica virgifera
ttaataattaagctataatgcagacgatcaagtgtgtggtggttggagatggagccgttggtaaaacttgtttattaattagttatactacaaataaatttccttccgaatatgtcccaacagtcttcgacaactatgcagtgactgttatgataggaggggaaccctacaccttaggtttatttgatactgcaggtcaagaagattatgacagactacgccccttaagctacccacaaacagatgtcttcttagtatgtttttcagttgttagtccgtcctcttttgagaatgtcaaagaaaagtgggtacctgaaattacacaccattgtcagaaaacaccttttttattagttggtacacaagttgatcttcgtgacgatggagctaccatagagaaactagcaaaaaacaaacagaagcccatatcaattgaacaaggagaaaaactagccaaagaactgaaagcagtaaagtatgtcgagtgttccgccttaacccagaaaggactgaagaatgtttttgatgaagcgattcttgcagctctagaaccaccagaaccagtcaagcgcaaaaagtgtgtcatcttgtaaatctaattacacacctttaaaccccatcagaaagtatcaaaagtatttctaaggagggacaaaatagcccaaaacaaggacaattttttatctctttcctgaagttggcatcgagttgaaaattaatacttttggtatatgcggctgttggtaggactttcttgtattatttcttccaacatattggattttcttcctatttgatgtgtgtttgtgcacaataattaattgaaaaaccattttacagggtgtaccataattgttagatactttagttaaatgataatagatggcatcatttgagataaaatttgatttttattcacgaattttctccatgtattctttgttatgtattaaaatgtacaatttatattcaaattgaatctttgacatcaaagtcgtggcgccatctagcagctcttttgaaatttataccattttcgtattatctgtacatatttagttgtaacacagatggggagaggcattattttacaccctgtataataattgattgatttgaatgcaagaaacatacaatttattccagagaaagctaaccacagcatctaggacatatccaaagtcctataatctttcaatttgtctgtgctaacttctaacctcttttttacaaacttatcaaacgtttgacttctgttaaagctttttaactaatatagattgtctaaaagggcagtaatcgtttacttttgtttcttccggtatgctcaaaaaccatcaacacagtttgtagaggaactaaaatttttggagagactgaaggagacgttgacaggggttctcatacctgcctagagaagataatacaataatacattttatatatttattaataatatagtaataatgttgcgcgtgcgttgtctactaagcattgtggatttggtcgatcttccgatttagtttaagaaataaaaatatatgggcaacttttttttggttttgtttcctggccttggtgtgaaaccttagccacgtaattactataactatctcgggggagtaatgtgtagtgtgtgttgagtaaatgggttgttacttagtaaattcggcttcgtaaagacaaagtttctacccagactggattcgaacttattgggttcaaaggtaggctctcttaccactgagccacggaagcttgtacccgtctttgttaagattagtttatagttggcgaagaacatttcagtaagtttagctcgcgtatttcgcctctaatcttggaaaaaatatatggacgtgtttcaaatttcaaacaaattgtttattttaagaaaaacgttacgaaaacatatttagttcaaaagtactaattcctcaatatatttcattatttgaactaacattttttttatcctgattattgatttagagatgtgtacaaatcaacaatgcattagtgaatccttcactctctcttagtgtacataatttgaaacaattaattttacatccaattataggtccatgacatgtgacacattcatgtcatatatcattaagtagcaattgctcaattctatgctttcgaaattataaagtaaatcctttctgcaccagtaaaacagaattgaacaattgtgtcagcagaaacatatatttttggatagtaatgggagtcgaatgagtgtccttagataggattttgttatgattaaagtaaactttattgtaacttactgagcatggggatacgtgagcgtggggatatactcggacatttactcaaataatccttatttttgaagcttggttaggcaaatacagagacaacttaaaaacaggttaatttcaaattttctttgccacactcggtgaaatagtcggacaagtttgctagtaaaatactaagacaacttaaaaacacagatatgttaaaaaaaatcataatgcagatgtggggctaaactaagacatgtgggaatgtccgggtatttcaccacaactatgattagaaaaggcaaatattaatcggataataaaaaggtattttcagatatcttccttttaacccaggtatttccaacaaatcaattagtgcaatattaggatattgctcataaacaccacaaagcagccgattgaacaaatcttagtatctctccagatagcttatgaaattttacatcagatagagcagataactcaaaagtcaaatatttaaagatatcctagtattgttctagtgggacgatatgtactatgtttatgagctttgtatgtattttgaacatatgttcgataatccgaacaatttgataatccaaactacccctgtaccaattagttcggattatcgacgctctactgtacacaaagttaacatcaaactaaacaataagcactataggatacataagaattattatcttagtgattttatttttaaaatttgtacttactgtctattggtatttgaagggcaattgctataatcgtatgcactagaataagcaactaataccaacaacgcgcacaaaagggagactttaaaaaccattttgaccaataaacacttgagaatatctctagctagatatacgagaagattttgttttaaagttaatgctaaaacattcaagatatatatgcctactttatttatttttctaatacttcctagaacacaaaatccttatatttttgttagattttgtaataatattatttgtttgatatagtttcttaaaataactttaatttaaaggtaaataggattaaaatgtaagtgatgtgttgttactgataacttttctctaagcttttacctatgtaaattttgcatatattaccaggtgaaggttataatcaaaaataataattctacaaaccttctcttttgcaagttctttgtattccaaaaaactatgtagaaacgggagtttttataaacatgtaagaaaagaaagaggtaccttgatataataaaaataaatttaacataaactaaatatataatggtagggaaacccaagcggggacttttgcagttactcgagcgcgtcagattattaaatggggagaaacctggtaccctgcagatgtacctctaccatatattggctcttaacacaggggagttcgttaacactagacgcaccaacatttctgcatacctagaagcaccgcagcggtcaaaatgacgggtattagaatttctattgccagccgtttttgaattctttttttacttgataaaaacctatattgagttaataactaataataaaagacatatttaattaatttaaatgaattacttaattatttaagcacgatttatgcagtagcaaaatttttcaattttgcttgtacaagacccacacaaattttatttacatttatgtatatgacaaatttcacatgtttttcactttcacctgctatgtcttctctgttgttttttgtggtgttgaatcgtggaccttgaacaaagaatatgtgcagaaaattggaagcattccaaatgtggctatatcggagaatagccaaaacagaatcggagagtcacaaatgaggaggtcctcagaataatgtagaagaaccgagagataccaccatcaaatctcgaaagtgcgagtactttagacacattttgcgaaatgaatccagatatacccttctagaagccatcctgcaaggaaaaatatgtggaaaacggggcccaggaagaagaacatcctgcggataaggtaaaaattcccatgatggtcgccaacattcatcacggataggcacataaaaataatatgctcaaaaatattatatgcctaagtgaatacataaatataagctagtgaagctactactatagtatagtctagcgctattgcaaagtaacttccatcctatagtgtcgacggaggaattctctaaactgcttccgcgaattcctcttacccggttagtaataattcctaaagaggtattggtatcctcaatctcaactttatcttcagaatcgctacccgatgaatgtccttgatcaacttgatcaggcacatactcgtcttattcattattggatatattttcatcacataactctactttatattcattatctgacaaattctgtacccactccaatagttatttctcagtcaaatatcgacgagacgtgataacagcagaaaagagaaagttcacaatgaaaaatcaaaatacatattgagcacgcacttgcaaaaagtatactcaaattacttaataacaaatgttttcgatgcattttatacataaaataagtaaaaacttcccagaaaaatagaacaaaatgtagaataccttgtcattactacccaatttttctagatagacattaagtatattcaaaatgtaattatactgtaaaagttcctgtaaaagagaaattataatcctcaaataaatattaaagtcccaaattataaattttgtaaaataaatatgaatgagtaatacaaagggtcaaaaagggaaagcagtcaaaatgactgctctgctgcttctaggtagacattagcatatcttaaaaagtaactccgctaagtagctgtaaaagagaaattatattcttgaaatagatctaggaaaagtcataaattatcaagtttctaaaataactatgaatgagtaaaacagagtgtcaataatagaaagcagtcaaaatgaccgctctggtgcttctagtgttaaggggggcccgaaaaaaaaatatatccttaaaaatctcaaaattgtcagattaagataaggtaagttaagtaaatgaaaagagtgtatatttcaaaaatctgacg

SEQ ID NO: 284 - DNA, 7174 bp, Diabrotica virgifera
attcagctagctgtcagtttagtgaaaaaattgtcattttccttaaatttccgaaaacgtttcaataagtaaagtggaaagtgtttaaattttattttgtgttttgttgcaaagaaaaagcaacatgacgcagcaactgttacctatcaagttccaagaacatttgcagcttaccaatgttggtatccatgctaccaacatcacgttcgccaatctcaccatggagagcgacaagtacatctgcgtgagagaaaaagttggagagacgtcccaagtagtcatcatagatatggccgatacggccaatcccatcagacgaccaatcaccgccgaaagtgctattatgaatccagcatccaaagtcatcgctcttaaaggtaaagcaggcgtagaaacacaaaaaacccttcaaatattcaacatagaaatgaagtcaaaaatgaaagcccacaccatgtctgaagacgtaattttctggaaatggatcagccccaatacgttagcgctagtcactgaaacttcagtgtatcattggtccatggaaggtgattcaattccacagaaaatgtttgacaggcattcttctcttaacggctgccaaatcatcaactaccgaacagatcccaaacaaaactggctgctactggtcggtatcagcgctcagcaatctcgcgtcgttggtgcaatgcaactgtactcagtagaaagaaaatgctcccagccaatcgaaggacacgccgcttctttcgcgaccttcaaaatggaaggaaaccctgaaccatcgactctcttctgcttcgcagtgagaactttacaaggaggaaaattacatattatcgaggttggtcaaagtccagcaggcaaccaatcgtttcctaaaaagacagtggatgttttcttcccacccgaggcccaaaatgattttcctgtagctatgcaagtgtccgctaaatacgacgtcatttacctgattaccaaatacggctatattcatatgtatgacatcgagagcggcacctgtatctacatgaacagaatatctagtgacacaatattcgtaaccgcaccccacgaagctacgggaggaatcattggtgttaatagaaagggtcaagtcctatctgtctcggtagatgaggagagcattattcgatacatcaacaccgtcttacacaatgctgacttagcgctgcgtctagctacgagaaacaatctttcaggagccgaagaactgtttgttagtaaattccagatgttgttccagaacggacagtacgccgaagctgctaaagtggctgccaacgctccaaaaggaattttaagaaccccagctacaattcaaatgtttcaacaagtcccgactcaacctggacaaaacagtccccttttgcaatatttcggtatacttctagaccaagggcaactaaacagatacgaatctttggaattgtgtaaaccagttttgttgcaaggtcgcaaacagcttctagaaaaatggttaaaagaggaaaaattagaatgttccgaagaattaggagacctagtcaaacaggcagatcctactctggctttatctgtgtatcttagagctaatgtacctgcaaaagttatccaaagctttgccgaaactggccaattccaaaagatagtcctctacgccaaaaaagtgtcttatactcccgactatgtattcctgcttcgccaagtcatgcgcaccaatcccgaccaaggcgcagcatttgcagggatgttggtagcagacgacgaacctttggccgatatcaaccaaatcgtggacattttcatggaacaaaacatggtgcaacagtgtactgcgttcctgttggacgccttaaagaataacaggcctactgaggggcatctacaaactagactattagaaatgaacctgatgtccgcaccgcaagtagcagacgccattctcggcaacaacatgttcactcactacgaccggccccacgtagcccagctctgcgaaaaagctggtcttttacaaagagctctagaacactacactgatttgtatgacatcaaacgtgctgtggtacacacccacttgcttccagctgattggttggttaacttcttcggaactctcagcgtggaagacagtttggagtgcttgagggccatgctgaccgcgaatattcgacagaatttgcagatttgcgtgcagatcgctaccaagtaccacgaacaactcaccactaaggctttgatcgatttgtttgaaggatttaagagctatgagggtttgttctatttcctcggctccatcgtcaacttctcccaagaccaagaagtgcacttcaagtacatccaagccgcatgcaagactggccaaatcaaagaagtcgagcgtatctgtagggaatcaaactgctacaatcccgaaagagtcaagaatttcctgaaggaagccaaacttacagatcagttgccgttgattattgtctgtgacagatttgatttcgtccacgacttagtgttgtatctatatagaaattcgctgcagaaatatatcgagatttatgtccagaaggtcaatcccagccgtttaccggttgtggtaggaggtcttttagatgtcgactgttccgaagacataatcaaaaacctaattcttgtcgtcagaggccagttctccactgacgaattagtagaagaagtagaaaagaggaacagattgaaactgttgttgccctggttggagagcagagtacacgaaggatgtgtcgagccagctacgcacaatgctttggccaagatctacatcgattccaacaacaatgccgaaagattcttgaaggaaaatcaatggtacgattcccgagttgtgggacgttattgcgaaaagcgcgatccacatctggcttgcgttgcttacgaacgaggccaatgcgacagagaactgatagctgtatgtaacgaaaactctctatttaagtctgaagctcgttatttggtccgtagacgtgacggagaattatgggctgaggttttgaacgagagcaatccttacagacgtcagttgatagaccaagtagtgcaaacagctttaagtgaaacccaagaccccgaagatatctctgttaccgttaaagcattcatgacagctgatttaccaaatgagctcattgaattgttggaaaagattgtattggatagttctgtgttctccgagcatagaaaccttcaaaatttgcttatcctaacagcaatcaaagccgatgctacaagagttatggactacatcaaccgcttggataactacgatgcccctgatatcgcgaatatagccatcaacaaccatctctatgaagaagctttcgctattttcaagaaatttgatgtcaacacctcagctattcaagtattgatcgaacaagtcaacaacctggatcgtgcttacgaattcgcagaacgttgcaatgaaccggccgtatggagtcagctggccaaagcgcaactgaaccaaggcttagtcaaggaagcaatcgattcttacattaaagctgatgatccttcagcttataaggacgtcgttgagaccgcttcgaaaaataatagctgggaggacttagtgcggtatttgcagatggcaagaaagaaggccagagagagctacatcgaatctgaattgatttattcgtacgcgaagaccggaagattggctgatttggaagaattcatcagtggacccaaccatgctgatatccagaagattggtgataggtgctttgacgacaagatgtatgatgccgccaagctactctacaacaatgtatccaacttcgctcgtctagctattactttagtgcatctaaaagaattccagggagctgttgacagtgctaggaaggctaatagtaccagaacatggaaagaagtgtgttttgcttgcgtcgatgccgaagaattcagattggctcagatgtgtggtatgcacatcgtggtacacgctgatgagttgcaagatttgattaattattatcaagatagaggatactttgaagaattaatcggcctattggaagcagcattgggcttggaaagggcacacatgggtatgttcaccgaattagcaattttgtattccaaatataagcccgccaaaatgcgcgaacatctggaactcttctggtctcgagtgaatatccccaaagttcttagggcagctgaacaagcacatttgtgggcagagctagtgtttttgtatgacaaatatgaagaatatgataacgctgtgttagccatgatggctcatccaaccgaagcttggcgcgaaggtcatttcaaggatattattacaaaagtggccaatatcgaactttattatagagctattcaattttacttggattacaaaccgctgttgttaaatgaccttttgttggtgttggcacccaggatggatcatactagggctgtttctttctttacaaaaacaggacacttacagttggttaaatcctatctccggtctgtgcaaaatttgaacaacaaagctatcaacgaggccctcaactctctacttatcgaagaagaagacttccagggtctgagaacgtccatcgacgccttcgataacttcgacaacatcggcttggctcagaaattggagaagcacgaactgacggagttcagacgcatcgccgcctacttgtacaaaggcaacaaccggtggaagcagagcgtagaactgtgcaaaaaggatagactatttagagacgctatggagtacacttctgaatctagaaatcaagaattggccgaagagttgctggcatggttcttggataggaaggcctatgattgtttttcggcatgtttgtatcactgctacgacttgttacggcccgacgttatccttgaactagcatggaaacacaacattatggacttcgcaatgcctttccttattcaagtaactagagaactgacgacaaaagtagaaaagctagaacaatcagatgcccaacgacaaagcgaggctgctgaagaaacgaacaagccaatgatgataccagaaccccaacttatgctaacggctggccctggcatgggtattccaccccaacagtatgtacctccccaaggctacgcgcagccaggctacgccccgcaaatggcttaccagggatacccaggcatgtaatataaggccccttttacagccaactgtataggaaagtggaattagttttcaagttaaactgaggagctagtgctaaggacaatagagaagttataactaaaaaaatagcggttccaattcgtttcgtgtattatgaacaacgttactttctaaaagaagaagaatatattgaggagttcgtttttaaaattatgtacaagtagaagttttaatacttggttaactaaaaacgttacatttttttgagattacaaataactgaataattgaaaatattacttacaattttatgcgaactgctcgataaatttctcaaaaatagcaaaacaaataataggtttattgaagtgttacagaaaatttaggcatttcctttaaatcaaataaatgtttcattatttgtgtgaaaagttatttattaacattattcatcttttgctaaaaaacagttgagattattgcaaaatgttattgcattttgaaagtaaagatgtaaatgtgttacaaatgatctatttgtagttttgtcatcattatgttttgtttttccgtccattgttgagtatatttcttcataaataaagtatcagatgatgtttatatataatacaataatttttattctttaatcgcttcaatatttgttataatgtcttcaatttcaacatattgtttttttttgtcgtattggtctttttagtgtttcctgccacctctaaccaattattaggcgattttacatgaggattaagcctacagatgtcaaaatggcgtcatatctatcgaatgacaactgacagttgaagtgtcatatttaaattatgatcatactgttccgtctttcttcgtctgtaattctaattcgttcataacgatctacctcctcttttcatttttttttgtgtagttatttaggcatttttaagtctacgactgtcaaaatagtgtcaactgacaagttggaagtgtcatacttaaattatcaccattttatcctgactccctttgtcttcaattttgatttcataataatttttatttcagtgcccacttgaacctttttttataatttacatatctcatagtcatttttaggcgtttaacttacaacattgtttccacacacattttccagcttcgatatcagttattgatttacaataatttaaatttgctcctttatacaaatgtaacaacccaattccaacccttttattaattttctttttgttttgataagatttatttgcaacaaacaattctagcgaaggaagaatttccaacaagttaaaaacaaacttatttcaattgtcaaaccttttaattttctttcgaaatcttgatatttctttcgctagaataattgccccaaattgaatttcaggtactttccttcgagtcaagatctggtcataaccccaaaaaagacagttgacgtgtcgtgtcatgacactgacgtttgaacacttcaattgtcagttgtcatggaagaccgttggtagagataaaatgaccaaattttctgtagcacattatgtaagcttaaagaataaatgcttaaacaaattctagttaaatacaatcaatcttgttgaactgtttgttgtagttttaattcattcgcatcattttcggacattaggcttcgttttgacgggacacttgatttactttttcagttggagaatgtatatatatttttatgtactagcaccccactttagaatgtatataatctaaagaaattattttgttttccgagagaattatcaatgcgttcttttgtttgttttcttttttttagtccgtttaccattcctttatttaaacatagatatatgtatatgaagtgactatttaacttatattattatatgaattatatgaaagtgattcttcaatgtttaataaataactaaattgttttttttattcattattattcttatttatgttaagattttgcgaatatattagtaaatatatgtaaagaat

SEQ ID NO: 285 - DNA, 1756 bp, Diabrotica virgifera
tacaaattggtggtgttgttcgccgttttggctgccgtctctgccagacccagtcatcttcttacaccagtggtccacagcgcagcagtgatcggttcagtaccaaccagcattagtgaacacagcacctcgatcgtccataatcatgctttggtccatgctgccccagttgtacactctgctccactgatccacaccgttcacgctgctccagtttttggacacgtgaagcatattcttggaatcttcacaatcccaaaatgccgctgtcgtgtcgattttataaagaaaaataccccgaagtggaagatgtagtcatggtaaatgtaagggccatcgctgaaatgggggcatacgtccatttactagaatacaacaatatagagggcatgatcctgttgtctgaattgtccagaaggcgtattaggtcaattaacaaattgattcgtgtaggaaaaaccgaacccgttgtagttataagggtagacaaggaaaagggatatatagatctttccaaacgtcgtgtaagtgctgaagatgtagaaaaatgtacagagaggtttgcgaaggccaaggctgttaattcaattttaaggcatgttgcggaattactaaagtatgaatcagatgaacaattagaagaattgtatcagaagactgcttggtatttcgaagaaaagtataagaagaataaagctagtgcatatgacttcttcaaacaggctgttttagaccccagtattttagcagaatgtgaattagatgacaaaacaaaagaagtcttgcttagtaacattaagagaaagctaacatctcaagcagtcaaaatcagagctgatattgaatgtgcttgttatggttatgaaggtatcgatgctgttaaaactgctcttaaagctggcttggctctttcaacagaagaattacccattaaaataaatcttatagctcctcctctctatgttatgactacatctacacctgaaaaacaagatggtttaaaagttttaggagatgctatagaaaaagtcaaagcgacaatcacggaattgggtggagtatttaatattcaaatggctcccaaagtggtcacagctaccgacgaagccgaactcgtcaaacagatggaacgagctgaactcgaaaacgcagaagttgctggcgacgacgacgaagaacaagacgagggacaaatctacagcgaagaagataaagacgataaagaaaattctggtgaagaggaagatgaggaataatatttttctttgcgattcaaaggcgtaaagaaaaattgtatattataagaatttatttaagccactatcaacagtaatttattatctatcgtggctgaatggatcaagtaatccaaagccaataaggaaaaaaaaataactctaatgacttcatatgtatctggcagaacatgtcatagcttggaaaataaaggagcgctaaattcgcgattggggtgctgagttggcacctagttggtgcttaattgtaggcttggtcacttttcgatttgatgttttttatggttgtgctctgctgagttcatgtgtacctggcagagcacgtcatgatttggaaaagaaggagcgctaaattggcgattggggtgcttaattggcacctagttatgcgcttggtctggttctattctgctggccttgctctgctaggttcatggaatgttatttgtattttgttgtatttcatgggtagcagcactacatataggtaggtagtgcag

SEQ ID NO: 286 - DNA, 1802 bp, Diabrotica virgifera
cttttctataaattattatatggctttgttaaatgcctgtttaacgtcaatctttgaataacacgtctatcgaattttgctaaaaactatccagtgagctctgctgaaattgaatatgtaccgtctacctaacactgttcgctctgtggcactccgcaaggcccacataaataatcaagttcaaagatggtacgccaaagatgtaaggtttggatcagaggtcagagccctgatgctccagggggtagatgtacttgcagatgcagtggcagtgacaatgggtccaaagggtcgtaatgtaattattgaacaatcgtggggatcaccaaaaattaccaaggatggtgttacagtagccaaaggagtagagctcaaagacaaattccagaatattggagctagactagtacaggatgtagcaaataacacaaatgaaaaagctggagatggaacaacaacagccacagtattagccaggtcgattgcaaaggaaggatttgataacttaggcaaaggtgccaatcctgttgaaattcgcaaaggtattatctcggctgttgaagaaatcgttaaatcccttaagtcactttctaaacctgtcaccacaccagaagaaattcgtcaagttgccaccatttctgcaaatggtgacgaatcagttggtaatttaattgcagatgccatgaagaaagttggaaaggaaggtgttatcactgtcaaagatggtaaaacccttcatgatgaattagacattattgaaggtatgaagttcgacagaggatatatctcaccatattttgttaatacacctaaaggagccaaagtcgaatatcaagatgctttgcttttgctcagtgaaaagaaaatttcttcggtacaaagcattgttccagctttagagttagcaaatgcccaaagaaaacccttgataataattgctgaagatgttgatggagaagcactgaccacacttgtagtgaacagactccgtattggtctacaaattgctgccgttaaagcacctggtttcggtgacaatagaaaagctaccctgcaagatatcgccattgccactggtggtctggtatttggtgacgacgccaatattgttaaactagaagatgtaaaattatcagatctaggtaacactggagaaatcgttattacaaaagatgatactctcattcttaaaggtaaaggtaaaaaggaagacattgacagaagagccgatcatctccgtgaccaaatcgaaaccacaacttcagagtatgaaaaggaaaagcttcaagaacgtcttgccaggttagcatcaggtgtagcagtattaaaagtcggcggaagcagcgaagtagaagtaaatgagaaaaaagacagagtaacagatgctttaaatgcaacaagagcagctatcgaagaaggtattgttcccggaggtggtactgcacttttaagatgcagtcctagtttggatgcactcaaacctgcaaataaggaccaagaagtcggtatacagattgtaaagagagctttaagagtaccttgcatgaccattgctcgtaatgcaggagtagatggagcatctgtggtagctaaagtagaacaacaacaaggagattacggttatgatgcgctcaacaatgaatatgtaaacatgtatgaaaggggagttattgatcctaccaaggttgtccgaactgccattgtagatgcctccggtgttgcctctctcttgaccacagctgaagcagtcatcacagaaattccaaaggaagaaccagccatgcccgccggcggcatggggg

SEQ ID NO: 287 - DNA, 4256 bp, Diabrotica virgifera
aaaggaaccaagatggcgggccatttcgtgtaaagtcacttttgaggaaaaagacatatttttcagtgcaaatatataattaataagttatgatttgatgtaattagtgctgtgagtaatttaaatttaggaaaaatgtcggtcgatcgggaaatacccgcagaggacagtattaaagtagtgtgcagatttcgacccttaaatgactccgaagaaaaggctgggtcgaaattcgtagtcaagtttccccaaggagcagatgaaaattgcatttcgatagcgggcaaagtatatttattcgataaagtttttaaaccaaatgcaacacaagaaaaagtatacaatgaagcagcgaaaagcatcgtcactgatgttctatccggattcaacggcaccatattcgcgtatgggcagacatcatctggtaaaacacatacgatggaaggtgtcttaggtgatccccagaaacagggaatcattccaagaatagtaaatgacatatttaatcacatctacgctatggaagaaaatttagaatttcacattaaagtatcatattttgaaatttacatggataaaattagagatttattagatgtctcaaaaattaatttaagtgttcacgaagacaaaaatcgggtacccttcgtcaaaggggcaactgaaaggtttgtctcaagccccgaagaagtattcgaagctatagaagaaggaaaatctaataggcacatcgctgtaacaaatatgaacgaacattcgtctaggtctcattcagtatttttaataaatgttaaacaagaaaatttagaaaaccaaaagaaactatcagggaaactttatttagtagatttggctggttccgaaaaagtgtcgaaaacaggcgccgaaggtactgttttggacgaagctaaaaatattaacaagtctctgtcggctttaggaaacgtaattagtgcattagcggatggtaacaaaactcacattccttacagagactctaaactaaccagaatccttcaggaatcgctcggaggaaacgccaggacgacgatcgttatttgttgttctcctgctagctttaacgaatctgaaactaaatcgacgttagaatttggtaaaagagcgaaaactgtaaagaacgttgtctgtgtcaacgaagaattaacagcagaagaatggaaacgaagatacgaaagggaaaaggaaaaggtagcgcgattgaagggaaaattagaaaaattagaggacgaactcaacaggtggcgaagtggagaaacagtgaaagtagaagaacaagtaaacctcaacgaaatatccgacgcagttaccccagtagcaatggaagagagcgtcatcgcggagaaaccttccggtcctcttcctgccactccggctctaatgatcggctccacgttaggtttagaagaaagaaccaaattggaattggaaagagaacgattataccaacagctggatgagaaagatgaagaaattaatcaacagagccagtatgtcgagaaactgaaggagcaaatgttagaacaggacgaactcatcgccagtacgagaagggactatgaggccttgcaggctgaaatgaacaggatacaacaagaaaacgaaagcgccaaagaagaagtcaaagaagttttgcaagcgctcgaagaattggccgtcaactacgaccagaagagtcaagaagtcgaagctaaaaacaaagaaatggaatctctctctgaagaactcatgcaaaaacagactaaccttaactccactaccaccgaattgcaacaattgcgtgacatgaataaccaccagaagaagagaatcactgagatgctgagtaatctactgaaggagttaggagagataggcagttcgctgggaggaggggacggtcaagatattaagatatctaacgatgtggctaaattagaagaagaatttacggttgcacgattgtacatttcccgtatgaaaagtgaagtcacaagccttacacagcgattgcaagagatcgaaaacaaagaacaggacagcaacaaaaaagttactgaatacgagaaggaattggctgagtgtcgattgttgatttcccaacatgaagctaggatgaagagcttgcaggagtccatgagggaagctgagaacaagaagagattgttagaagagaatatcgatgcgctgagggaggaatgtgctaaattgaaagcagcagaacaggtgcaaagtgcgagtgagagtgaaaagaaggaagccaatgaacttcgtgtagctttggaacagcaaatggaccagttgagagatgtccaccagaaacaagttgcggcattgagggatgagatagcagaaaagcagagcttgataaacgatatcaaagattcaaaccaaaagctcactctggcccagcaacaactccaagcagattatgagaagatcaagtccgacgagaccgagaagtccagcaaactgcaggaactcatcgctacgaacgagagacgcgaacaggcgagaaaagacctcaaaggactcgaagacactgtcgccaaagaactacagactctgcacaacctgagaaaattgttcgtgcaagatttgcaggcacgtatgaagaaaaatctttcgtcggaagacaatgaagaagacggcggctctctggctcaaaaacagaagatatcgttcctcgaaaacaatctcgatcaattgacaaaagtccacaagcagttggtacgagacaacgcggatctgcgctgtgaacttcccaaactcgaaaagagactacgagctacgatggaaagagtcaaagcactggaaactgcactgaaggaagccaaagaaggcgcgatgagagaccggaaaagataccaatacgaggttgaccgcattaaagaggctgtgaggcagaagaacctcgcaagaagaggcccagcagccacaatcgccaaaccaatcagggcagggcaacacaacacggttaacgtagctggtaaccccgtcattagaactggaggcatcaacatggccaacagatcgaccgacgaccagaaacgtaggtctgttattggtggagataaagattgagtcgccagccatcttgtcaggtgcttgagacgtttttagtaagcaaaatccataaaactgtaataccaaaaatattgccgatacttcgcgcgagtctgtcgccagcagtttttggaacagacaagaaaaaaaattgctcctccagactcgctcttcaatgtgcttacagcttagatatttctgtagtataaggtgcacttcattgcattgaaaatgaaacaaattaatcgagtattgtaacagattgttggcaaattgttttaataaatcgttcattttttgttttcgatcacttctagcttcctgtcgaattaagtgttaacactaaaaaacaatttgcttgctgttttatccttaaaacgttgcaacgtttacggcgattttttgagttaggtaattctaatttttgtaccgcgtttttaatttaactgaaggtactagaataataaggccttaaaggaccaatctttgtttaatctaggaaatttttgtttttctttgtgattcgatttagtttaattttacgaatttttttcccagtgtgtaattctaattgaattagttacacttaaacacataaaatgaataaatatagttagtgaaactgttttattttataaatgtactattaatttttcatttcgatgaagcatccataaaactaggttgtgttcgcacatgtatttcctaactaagatcaaaggagagtaaattaaatgtaacgttagttgcgttttatcagcttcaaggcgtggtttgatcttcaccaaaacaagacaattttaaagattttttagtactcagaaaatagagccatgaaaaagaacttaaagattgatggtggtgaatggattctaactcatctggtacttgtgatgcagtgtgagtgctatccgaggaatgggtgttatccgatgataatcgtaccctcataaattgcataaaaaaaaacctaacaaaatctctttaaaaaaatatgaatatctcctaagaatatctaggagccttgaacacgcgccaactttttttaagagttactactgtggctactttttcaaattttaaaatctctagaaaacaaaaaaatctttttcataaaatttttgtctcaaatataaaatgtcactaaatcgtaaaattgctatttgtgaaccagtgtaatgtattttccccag

SEQ ID NO: 288 - DNA, 2159 bp, Diabrotica virgifera
gataatactttatcgcatctagaaaacgttgagagtatcattagcaaattagacgaacacgaaaagaaggaacaaaacttgaaaaaattcgaagaactagtcaaaaaattcggccccaagcctgccgaaaaggccaagaaagccgcggctcctttcgaacagtcccctaagaaacaaacgaaaccattggatgcgtcggaagaccaactcaaatctcaagagcacatcctcaacccgatcaaacacgccagtgaagtcgaagatttgcccgccaaaggactcaaagaagaggagaacgagaaacatcatcagcattttaacagaggtgccaaggaaaggaagagtacggatacgaacgagaaagcgaaacctgtgcagcagcctttaagcaggacggcttccgatgctcaaaacaaaagtttgaccaacgcgaaaaagtcgtcgacaaggacctctagggatcgtacctcacgaaaaaccaatgacagcacagtggaatcaacgcgcagcagttccgcgtcgatgcggaacaggtcgcgagtgggagaagaaccgaccatcggcaaatacaagctactcaaaaccatcggaaaaggaaactttgccaaagtcaaactggccaaacacgttcccacgggcaaggaggtggccattaagatcatcgacaaaactcagttgacacctggttcactccaaaaactatttagagaagtaagaataatgaaaatgttagaccatccgaatatagtgaaactctttcaagtgatcgaaacggagaaaactttgtacctggttatggaatacgcgtccggcggagaagtcttcgattacctcgttctgcacggtaggatgaaggaaaaggaggcgcgagcgaagtttaggcaaatcgtctctgcagtacaatactgccatcaaaaaagaattatacacagagatttaaaggctgaaaacttactgttggatagtgaaatgaatattaaaattgccgatttcggcttctcaaacgaatttaccccaggaaataaactagatactttttgcgggagtccaccttatgcagctcctgaactttttcaaggtaaaaagtatgacggtccagaagtagatgtctggtcgttaggcgtaatcctctataccctcgtctcgggtagtctccccttcgacggttcgacgctcagggagctgagagagcgagtacttagaggcaaataccggatccccttctacatgagtaccgactgcgagaatctactcaagaagttcctcgtactcaatcccgccaaaagagctagcctggagactatcatgaaggacaagtggatgaaccaggggtacgaaaacgacgaactgaagccgtacgtcgagcctgagcaggatatgagcgaccccaaacggatagaggctctagtttgtttaggatttaacagatacgacgtggaaaactcattagattcacagaaatacgacgacgcgtttgcgacgtatctattattaggaaggaaaagcaccgatccggaaagtgacggtagtcggagcggcagcagtttatccctgcgtaacatgacagggcaacaacaggccacgcctcaacctgctatacagagccctcaacacagaggcgtgcatcgttcgatttcggcgacgcacgctaaacctaacaggagagcatctagtggaggtggaaccataggtgaaactctaaggacgggagcccaacctcaagtacctgcctcgcaaataaacaaccaacaatcttcaggtttcaaacggcaaaataccgtcgatagtgctacgatcaaagaaaatagtgccaggcttaacgccagacctgccagtgctcaacccaagacgactacggagaatagtttacaagctccgactaaagctcgaactgtatttaagaaccaagcattatctttaggaactaccgtgggacggaggtctaccattagctatgacggcaaatcagatagtacagagaaactaattcgactacagaaactccaggccgcacaagcgcttcgccagccgccaccaggcaacaggccttccccaggaatacatcctcgaggagcaccttccattcgggccagaccaggccaagggcaacgtacgcccaaggggctccgggagactctccacacacaagaccttcgttt

SEQ ID NO: 289 - DNA, 992 bp, Diabrotica virgifera
cggaaattggcgcggaaaattccctctatttcagttttcgcttctctaccggccatagtcctttgtcatcgtgttgtgtatttttcaattattttaactgtttattaagtacaaataaatccaaaatgtttgaagcacgtttagttcaaagtgccaccttcaaaaaagtattagacgcaatcaaagatcttctaaatgaagcatccttcgattgttccgaatctgggatccaactccaggctatggataactctcacgtttccttagtctccctaacgctgaaatcagatggattcgacaaatacagatgtgatagaaaccttacaatgggcatgaacttgggaagcatgtcaaagatcttcaaatgctccagtaatgatgacacagtaacaatcaaagctcaagatgatgccgacatagtaacgtttatgtttgaagccaaaaagcaggacaagatctcagattacgaaatgaaactgatgaatttggaccaggagcatttgggtatcccagaaacagatttctcttgtgtcatcaggatgcctgcagctgaattcgcaagaatagtcaaagatctttcacagtttggagaatctatcgtaatctcatgcacaaaagagggtgttaggttctcaacttctggagatattggcagtgctaacatcaaaattgcccagacaagtaatttcgaaaaggaagaggaatctgtaagcatagaaatgcaagaaccagttactcttactttcgcttgtcagtatttgaattccttcaccaaagccacacctcttactaacgttgtgcagctatcgatgtctgacaatgtacctttagtagttgaatatcaaatacctgatttgggccatttgaggtactacttagcacctaaaattgaagaagatgaaaattaagatctctctagttttctttttactatttttaagggccttaatctattttagttttaattatgttcttgtacactttcttatttg

SEQ ID NO: 290 - DNA, 1030 bp, Diabrotica virgifera
tgactttgacagtcgacgtagcattacaaacgatttttgaggttgtcggctagaagttcgcaaagtaaatctaaattccaacaattaaaccgaaatagttctttaaaaaagatgtttcgaaaccaatacgatagtgatgtgacagtgtggagcccccagggccgtctgcatcaggtagaatatgccatggaagcagttaacctaggttcagccacagtgggactgaaaagtaaaactcatgctgtacttatcgctttgaagagggcttcttcagaactgtctgcctaccagaagaaaattatcaacatagacgatcacattggtatcaccatctcgggacttacagctgatgctaggatccttagtagatatatgcgaaacgaatgcttgaattataagtactctttggatacttatatgccattgaataggcttatcagtattttaggtaacaaaatgcagacatgtacccaaagatacgaccgcagaccatttggtgtaggtcttctagtagctggttatgacgaatctggttctcatatctaccaaacgtgcccttctgctaatttctacgattgcaaagctatgtccattggagctcgatcccagagtgccaggacatacttagaaaaacatctggatgaattgccatctagttctttagaagaacttatcaaacatggattgagggctcttagagatactctacctccagaggttgacctcacaacaaaaaatgtctccataggatacactggcaaaggtcagacctttaaaatcctcgaagaagaagaaacttccccctacttgtcccttattgagggtgaagaacgtagaggaggaggagctgcagctgctgcaattgaggaccttcctgcagatccgttgagagatgatgcgggggacgagcccagggatgcagtcccagctgtggaaacttctgccatggataccacagaatagaaggattagataaagcattaaagccacccgttgatcaggagagtgggtattggaaaggaatattgcc

SEQ ID NO: 291 - DNA, 716 bp, Diabrotica virgifera
gggggtttgacagttgatctttcgtcctgcgccgccgcttggggtgttctgctgttctttcacaccgactgccggccattatttgtaagcggcgaaagattcggcgttgctttgtaaaattgttgtgaatctaccggcatcaaaagcctaaaaagcgtgtagcttttacgtagttatttaactgtagctactttacaaatttcatcaaaatgggcgatgaaaagaaggccagcgatagcgaacacattaatctcaaagtacttggtcaggataatgcagtggtacaatttaaaatcaaaaaacacaccccattaaaaaaattgatgaccgcctattgtgaacgtgctggtataagcacacaagtagtcagatttagatttgatggcaaccccataaacgacacagatactcctaattctttagagatggatgaaggagacacaattgaagtatatcaacaacagacaggtggtttcttctatcggtttctattcatttaaataatcacactgtattgttcttgtattttcttatttgctaaattaaactagttttaaataagtaagttaattttaatatagtttttatttcatgtcaactgaagttacaatagttctgtaagaattcgactatttgtgtttttggactcttattttgtaattaaaacacttagaatacaaacatttttcttataaaaaaaaaaaaaaaaaatcgga

SEQ ID NO: 292 - DNA, 740 bp, Diabrotica virgifera
ggggactggtaaattgataattgatggagtagttgttttgtttgaaatttcttgaattcttgaacatttttctaaatcatggctttaagaacctacggagataaaccaataagttttcagctcgaagaaaatggagactactattgtgttggttccgaggtgggaaactatctacgcctctttcgaggttctctctataagaaatatcctggaatgttcaggagatcaattacaaatgaagaacggaaaaggttaattgaacttggtctaagtcaacatgttctagctagtagcgtatcactactgagagcagctgaagtagatgatatcatcgaagggaatgacgaaaaatataaagccgtatctgtccatacttcagaaccaccaatgcctagggaaagtaaatcgaagaaaaatttgcaatgggtgccatctttgccaaattccagtcatttagatgcagttcctcaagctactcctattaataggaacagagtagcatcaaaaaaggtgaggacattcccattatgttttgatgacacagatccacaagtaaacattgaaaattcttgtcagcaagaaatacttgttcctattagacttgatatggaaattgaaggacaaaaactcagagatacttttacatggaataaaaatgagagtttgatttctcccgaacaatttgcggaagtcctttgtgatgatctcgatttaaaaacccattgacgtttgtgcctgcc

SEQ ID NO: 293 - DNA, 1108 bp, Diabrotica virgifera
gggggggaaatcgcgagaatacgggcgaggtttgaagtttttaattttttgttcatatcaccacttaaagctattgttatcattttagcatatataaaacaatagcttctgtgttggggattaacagtcgcggttgagctaaaaaatatatatttgttaatgttataaataatattcaaaaagtttgtttaattcaaaactggcgcatttcgtacgcatgaaaaaatagttcgaattgacattggaaacattttgatagttgtggtgacgtttgctgtaaatctatttaatttttggtgatttaataattgaaaatatttctgggaattaacgtagtttctagaaaaaatatcggtgacttattttggcgtagtaaaattgactcgcgcaggcgtacccccagctgccggtaggacaacgtccccaacagatctccgaagacagacagtcgattttattcagtgattctgattgttcagtttttgtagttgtacagttttcgtattaggaaataaatcaaatatggcatcaggagtaactgtagcagatgcctgcaaaaaggtccatgaagaaatcaaaagggacaaaaaacacagatttgcaattttctacatcaaggatggcaaacagattgatgttgaacacataggagaaagaaatgcagagtatgatgatttcctaactaaactgcaagagggaggtgctaatgaatgtcgttatggacttttcgattttgaatacatgcaccagtgccagggaacctcagagtcaaccaagaaacaaaagttattcctgatgtcgtggtgtcctgaaactgcatctgtcaaaaagaagatggtgtatgctagctcattcgaatatcttaaaaaagctttggtaatacagaaatctatccaagcgacagatttagcggaagcgagtataacagcggtagaagaaaaattacgatccactgatcgtcagtaacgccttttatttttattatttttctttttgtatctcgactgtctactcacgcaccgacctaccgaggtgtattatttatataagtatttgaatatttaataaagcttcatttataaaaaaaaaaaaaaaaaaaaaaatgcga

SEQ ID NO: 294 - DNA, 470 bp, Diabrotica virgifera
atttatgagaaatggaagatttaaggctaaaaattgatcaggcctgtaaggttgcagaagatttcacaaaactttattatgatactctggataaacgacggcatttgatagcaagactgtatttggagacgggattattatcatggaatggtaatggtgtaactgggaatgaaaatattttgaaatttatgattgatttaccaccgtcatcttttactatacaaactctagacgcacagcctgttttagattctgcagtaaatggacaactgaccttcatcactcaagtgactggcagtgtaaaataccaagagaaaacaccaaaaacctttcagcaaaacttcataattacagcacagggcgataaatggaaaattgtcagtgattgtatgaggctgcaagaaccattaaacgctaagaactaacaactgtatttttaagtattttgataaataaagtaattggtagac

SEQ ID NO: 295 - DNA, 3514 bp, Diabrotica virgifera
gtcataaagtcattggctcaaaaagaaatatgtcggcgtgttgagaggaacaagtgatagtgttgttgtaaaaagtattggttttccgttattcaaaattaatcaaacaattttctattagacttctttaaattgttgagatggcgcttaaaatggctgtacatacaagtagtatcatcggtatcggaaagcctgattatgtggtcggaggaaaatatcgtctacttcgtaaaatcggtagtggatcttttggtgacatataccttggaataaatattacgaatggagaggaagtagcagtaaaacttgaaccaattagagcaaggcatccacagcttttatatgaaagtaaactatataaaattcttcatggaggcataggaataccacatatcagatattatggacaagaaaaagaatataatgtccttgtcatggacctgctcggtccgtcgttggaagacctcttcaatttttgtacccgcagattcaccattaaaaccgtactcatgttggcagatcaaatgatcactcgtatagaatttgtccattgcaaatcgttcatacatcgtgatataaagccggacaatttcctcatgggcatcggccgtcattgcaacaaattattcttgatcgattttggactggctaagaaatttagagacaccagaactagaatgcatataatataccgtgaagataaaaatttaactggtactgcccggtacgcgtccattaatgcacatcttggtattgagcagtcacgtagagatgacatggaatctttaggatatgtattgatgtatttcaatagaggctgtttgccatggcagggattgaaggcggctacaaagaaacaaaaatatgagaagatcagcgagaagaaaatgtccacgcccgtagaagttctgtgcaagggcttccccgctgaattttccatgtacctgaactattgccgtggacttcgcttcgaagaaaaccccgactacatgtatttgcggcaattgttccgtattctattccgtacgctgaaccaccagtacgactacacattcgattggactatgttgaaacaaaacgccgcctccggtactggcagttctgtggcaggacaagcttcgacacaagcccatcaagctcaagcgtccgtcacaggtcctcacttaggcaatcgttaacccaacactcggcatcgattgagctaatctgcatattatggttggttgacctatttcagtctttaaaaaaacaaaaagacgtctgactcttttatataaaaattaaattttattataagtgagcatatacgaattattatttacattatctacacgtcgttttaacggatattgtataaaatataataaaataacaaaaaatatactgaagatggcgaccgcttacaaaacaggtcgtagtcttggataacgaatgtgagtcgaatgctgtgcgggagtgaatgcaagtcaggctgtattatttaaatattcttaggtagtataacatgtaattcggattcgagataataagtgagtacgtaaatgtcagaccagtctgttctttaaaaaatgcaaagattgggaccagtctccaggatattatcatcggaatattcaaataatctgcacgcaggctttatcaacattaaatttcattattatatactgctattaaacttagtccagtccagtcacttgcacaccatttattcttaagcacccactatactactcgcgaagttgatcaaagttcagcgagcacgagagtgttgacaggtacttcatgcgacttcgcttcgcctcgggctacttccattctgtgtcggttcttgcgaccgagttaaaggactccgaagttagcttctccttgcgcgaatgtgttcctccgaagttgaacgagtgtgtagcgatgcacttcggacaacattctctagtacttcgtcgagtaacttcgtgtgtagactcgctttaagcatgtcatatcactaatattatcgattactaggtctagttagttgtatctccgctatgagattccacgatctcagtggttttaatgtctgacgtcccactttttgatgttttttcatattcgcgacccatccctttcccatgatgatagaataaaataaattacacggtcactgtactctactcagctactgtaagaaccacgccgcgacccaccggttgggaaactctgcactatcttatatattattcgaaaacacagctacgttttattctcaaaattactcattattttttcgataaaactcttttgtctatttgctgagtttgttactatgtgtaatgtttgtattcaccaaaataattacaacttcctatgaattaaagcttccacataaattattgttaagttgccttctctctcctgaaccaaaagctgcccttctagtagtccttgccctgttagtgaacttaatgatccagttgtttgcataccacttattcctaaaatgtatcactaatatcgattattaggtctagttaattgtatctccgctatgagattccactctcttatatattattcgaaaagacggctacattttattttcaaaattactcaattcaactttttagtctacatatttgctgagtttgttactatgtgtaatctttgtattcaccaaaattacaacttcctatgaactaaagcttccacgtaaattattgttaagttgcctccttttacctgaaccaaaaactgcccttatagtagtcgctgccctgttattgaacttaatgatccagttgtttgcacatcatttattcttaaacatgtcgtatcactaatatcatcatcgatcattaggtctagttagttgtatctccgttatgagattccactatcttatatattatccgaaaacacagttacattttattctcaaaattattcgttatttttcaatacaactcatttagtctatttactgagtttgttattatgagttatatttgtattcaccaaaaatttcgacttcttatgaattaaagcttccacgtaaattattgttacgttgtcccctttttcctgaaccaaaagctgcccttctagtagtcgttaagcttgttgatgtcgcaattatgacattgtctattatttgtaaatggtggagaagatgtttattcatagacttatttaatctcgtttccgcccagtgcttggtttaagttatgccttcatgtatactatctatatcgaaataatctatagcgaaatatctgttctgtatatattgatacccttaagttttattattagcgtgcttgatagttttgtttattgcaattttttcatgaattgttgtcaattctaggagtctggtatataacacagcgattatacatatagtctgtccgctataagttttcccatgcagtacaacattttcaatcaaattaagtccaaacagaaagggaaacatgcgccgatgtgtgtagtatatagtatacagtatacaaaatgtatatacacatcggacgtt

SEQ ID NO: 296 - DNA, 1025 bp, Diabrotica virgifera
aaattggggaaacaccgggcgtgcaacatcgcaatcgcagttgagttgactcatttttgggtgtttctttgattgaacaaaaattacaagcgttttaaattcactaaatttgctttgaaatatacaaatagttaattctaggaaaatatataacctacatacaggtgagctgttaacattctttaagaatcatgtcttcccgcaaaaccgtaagccgccgtggtaccacaaagaaacgtgcccaaagagccacatccaatgtattcgcaatgtttgatcaggctcagattgctgagttcaaagaagccttcaatatgatcgaccagaaccatgatggttttgtagataaagaagatctgcatgatatgcttgcttccttaggtaaaaacccaactgatgactatctagatggcatgatgaatgaagctcctggtcccataaacttcaccatgttcttaactctctttggagaacgtctacaaggcacagacccagaagacgtaattaaaaacgcttttggctgctttgacgaagacaacaatggtgtcctcaacgaagaacgtctcagggagctcctcacgtccatgggtgatagattcactgacgatgaagttgacgagatgtacagggaggctcctattaagaatggcttgtttgattatgttgaattcacccgcattttaaagcacggggctaaggacaaggatgagcaataagagacgaattgatgatgaaaggatttgtaattaatatggaaagatgtcttagtttgaatgatttggattttcattccatttttgtgattagaaatatatgaaattcatcatactaagaccatcaagtcttgtccgttgcaagtatcttctgcacatagacatgtcatccttgaacaaaactgcaaaaatggatttgaaaaatccaaggttgcaaatgaattaacagtctaattatataagacatcttgttattgtacttaacatcctcttggcttgttattttaaagtattcccttgaatgttttgaat

SEQ ID NO: 297 - DNA, 1934 bp, Diabrotica virgifera
ggggaccggaccgccattttacattgccgaggtggggatacggtaactggcgttcttattgaaagaaatttacgaaagtggcgttttatttgaatatatttttaataaattagtgtaaattacagacataaacataaaattcagttactcggacctttaacaaaaagtgatagtgttttgtgattttggagtaaagaaagcttgctgcattgggaatctaacagcgtggctccattggcttctctttgtttctgtactttctgtcagggaaagtgtaagatatcttcatgtgcgacaatgaagcgcaccctaaaccgcgaaaggtaaccgaagggtcaagtcgcggacgctgtggtcagtagaagaacccattcggaacccaaagtgctaggtggtgtgattgtgcgcgtgcgtggcagtggcaccaatttgtgcatgtgtggttagttgcacccaatggacaagagaaaaatgatgcccaaaaggcctaggtttgagccacgcggcccaatttccaacggacccatgcagacgaggcctctcgtagctttgttggacggtcgtgattgttcgatagaaatgccaattttaaaagacgtggccacggtggcgttttgcgacgcgcaaagtaccagcgaaatacacgagaaagtgctcaacgaggcggtgggcgcgctcatgtggcacaccattatcttgactaaggaggacttagaaaaattcaagaccctgcgtattatagtgcgtataggaagcggtgtagataatattgatgtaaaggctgcaggagaactgggtatagcggtgtgcaatgtgccgggatacggtgtagaagaagtcgccgatacgacgatgtgtctcatattaaacctatacaggcgaacatattggttggctaatatggtgcgggaaggaaaaaaattcacaggaccagaacaggttcgagaagcggcggcgggctgtgccaggatacgaggtgatactttgggaatcgtaggactaggaagaatcggctcagcggtcgcactgagggcgaaagtatttggttttaacgtgattttttatgacccgtacctccccgatggcatcgagaagagcttgggcttgacgcgtgtctatacccttcaagatctcctcttccaatcagactgcgtgtcgctacactgtacactcaacgaacacaatcaccaccttatcaacgagtttactattaaacagatgaggccaggagcgtttttagttaatacagcccgtggaggtcttgttgacgatgacgccctagcacaagccctaaaacaaggtagaataagagctgcagccctagacgtacacgaaaatgagccatacaatgtgtatacaggtccactaaaagaatgtccgaatttactgtgcacacctcacgcagctttctacagtgatgcgtcggctacagaactcagagagatggcagcgtcagaaatcagaagggcaatcatgggcaggataccagagtgtctgaggaattgtgtcaacaaagaatattttatgggaccgggagcataccctgaagttttatgggaccgggagcataccctgaagtttcgccagctggagtaaatggtggttattaccagggtggcgccctaccagttcaacaggcacattcaacaacacctcatgaagcacctcacacagttacaccaagtgcggcagcgccacctacccctcaaccagcgccacccgtgggaccagtaccagtaccgccccacgctattcccatgagtactccagatccagcgaatcaccacgcacccaaaccggaaccgtcggaagtccactaacggtgtctcaacaacccagataagagtttcttgaagggcaaagtactgctaggaatgtgtggaatgcatgtcgaatcacatcatttaaataagttcatgttctttcaactcttt

SEQ ID NO: 298 - DNA, 1723 bp, Diabrotica virgifera
ttaatctatatttcagtttatattttaatttttatgttattgtcgccagctaaaaaatattttaaaaatgcctccgaaaaaaggcggaggacccaaaattatagatggggttgatacaacttctatgaccagagaacaattagaagctttcgcgcagagaataaaagaagaaaatgatagagaaagggaagaaaggaattttttccaaatggaaagggataaaatccgaacattttgggagattacacgaaacgaacttgaagaagctcgagcccaagtacgaaataaagacagagctttagaagaaggtgttgagaagaatgaagaagagttaaaattttttaaacaaaaagtaaaacatcttcaatacgagcatcaaaataatttaacggaatgcaaggccgaatcgctggtagcattaaagcaagcacaagatgaacatactgttcaagaacggcaacttctggaagataaaaaaagtttaaaagcccaaatgagagaaaaggaacttagtaaccaagaacaaatcaaatccctaaaaattcaaaacagtgaagaaattagtaaagctagaagcgaatttgaaattagagccaaagaaatggaaatgaaatatgaaaaaaagtacgcagatttaagagcccatctaaataataagcatgacatggaaatatcagaggtggaagaaagaaagaacgaacatatttctaacctcattaaacaccatgaaaaagcttttaacgaaatgaaaaactactacaatgatattactttaaacaatcttgccctgattagcagtcttaaggatcaaatggaaatcctaagaaagcagaatgaaagaatgaccaaacaagttgctgatttaactgcagagaacaaacggcttgttaaccctctaaacgcagcacttgctcaaattaaagaatataaaagacaattagaaaattatgagagagataaacaagctttagctaatacgaaattaatgttgtcacaaaagataaaagctttggatgatctcagatggtcttacgatgcattggaattaagatttgaaacacttcagaaagagagagatgaacttcataatagatttgttcaagcggtattggaagtgcaacagaaaacaagtgttaagaacttacttttaaacaaacgtattagcactctaactcaggtagcagaacatcgagaaattgtcatagcagaactacaagcggcaacaaaaactccgcctcaacggacaaaccaaaagctagaagaaattttaacgaaaaagaatgctacaataagtgatttacaatacgagttagctagagtctgtaaagctcacgacgatcttcttgaaaaacgtttgaggagaaactacaacaatatggaattcctaaacaagaattaggttttattcctttaaggattataccagaaggacaaggaggacttgccacaggcccagctggattagttacagaaaaccgttaatttacagtacgtgacatatttaaaatattatatattatatttttcacttaacatactctaggttttattcctttaaggattataccagaaggacaaggaggacttgctacaggcccagctggattagtaacagaaaaccgttaatttacaatacatgacatacagggtgattgattagtggggtaaagctcaatagatccgctatagtaatagatagcaataaaagttaataacaaaaatt

SEQ ID NO: 299 - DNA, 3055 bp, Diabrotica virgifera
actttttaaaagcacgagaatagtgttgttttttagtcagtattcagatttttacagtggtttttttggtttagtttgattaaatatagcaaagaatatagacattcttcgtaagcttacaatcctttgtgtgagaaaacatgacaagtatggtgcaaaaaagaaaaactcctcagcacttacaaaatgtaaaagtggtagtgagaattaggcctttacttaaacaagaggaggaacaaaatgtaaaaagtgttgtaacagctcatactcaccgagaattagttctcaaggagaaaaagtatagttttgacagagttttcaaaccaacagctacacaaattgaattgtatttgaacgttattgctcctttgattcacgatgtggttgaaggatataattgtactgtgtttgcatatggacaaactggtactggaaaaacatatacgatgactggagaaaaatgcaatctagttggagattggagggaggatgtacatgctggcgtaattcccagagcagcttttcacattttccatgaacttgacaaactgtcaaaagttgatgtaaacgttaaagtttcatacattgaattatataatgaagagattagagatttattaagtgacaatgagaatattttacagatgtacagtgacaacaagggttcagtaacaattagtggcatgacagaaatttctgttcgcaatggcgaagatatttgtaaatatttgcaacgaggtattgttaaaagacaaatagcaccaacgctcatgaatcatcagagttcgagatctcatacagtcttcacaatttcgataaataccagagaaaccactgtatgtggcgatgacattttaaaagccggaaaaataaatctagttgatctagctggtagtgaaaatatagcaaaatccggatgtaaggaaattagagctgtggaacttgcaaatataaacaaatcgctgttaacacttggacgagttatacatgccttagctgacaaatcacacaaacacgtaccctatagggactcaaaattgacgagaatcctgcaggattctctaggaggacacacgaaaactgccataattgctacaatatctccggcaataaattcgcacgaagagacttcaagtactctagaatatgctttcagagccagagatattaaaaatactcctacagttaatgaaaaaatgactaagaatgaggtgattgaaggtttggtaaaggaaattgacaaattacagaaagatttggacgctgcaagatcgggaacaggtttttatgtaaacaaagagaactatgaaagaatgatagacgctattgtagctgtaacaggagaacatttgacagcagatgagttgatggacaggaaagcagagagaattaaaaacttggaggatcgtttatattccagaatgagggaattcgatgaaactgtacaacaatgcaaagcacacaaggaagagttagaaaacgcgaaggccacaataaaagaacgagacgatagactcgaacaagaaaaattcctttcaaaatggtttgaagatcaaaccagcgaaaaattagaagaggcgcaaaagctactctcggcaaccaaaactttacacagtgaaaaagaaatattgttggctaaattggaacatcagtttaacataaatgtttccaatcaaaaaattacgaacactggggtttcaaatgctgtaaatatgttagaggaatttggaggtcacgagtgtaaacgaatcaaactgtccgaaaataaagtcaaagaacaagttaaaaaaagcgttgttgagttacagaaaaacttcgatgaaactttcaactctcttacggagttacgggaggattgcgagaccagaatacgagaatacaaaaatggattttccatcaaaaagactgtatcagtgaaatcgaaatactacctagatacactgagtgagaaatctagggtagtagaagatgttctatcccaatatgaacaacaacttactttgattaaatcggaggtttctaagatggaagaaagttacaaacaaaactcaataaaatattttgatgaagcaatgacattaattcaatcatctgacaatacagctagtgatataaattccgaacaaactagaaggtattacgagagttttaatcagatggagaaaaccttgacagagaggattaaagaagacacatcttcaatagccatattacagaaacaaatagccctattacagaaacgaatagaagaagacataattacattaaaaaggatacaagtagatagagacaatgttgttagtgctgaaaaaaagacaagagaatgtattttagaaagggccaataatctagaaaaattggcaaaagaagcactagaagggctgcataattgttacaagctacctaatttaattgcaatacaaaatgctaaagtggaagagctacgggctgtgatacaagaatttgaagacaaattaaatgagatttcttcggatctaaataaaaaacatgaagagattacacaacacacagtagacacgtataataattcaatattcaatacctgtaaaaatatagaagaagctatgaatgaaaaaattaacaatttgttaaatagtgtagatatgatggtaggaaaaactgatacagcggaatcgttttcaaagttcatctgtcatatgaaagaagtgctcgtccagcaactactagagaaaaacgtcacaccaaaacacgtaggagacactcccgtccgacaatccacgagttaccctcacaggataaaagaagtagctcctcgagaggcactcatcgaaaagtttaaacaaaccttggcgcaaaaaatggaagattcagacgaaagtgatgtagggtattgaacaagtcttgtgagaacgtgtgacagtatttattgctcgttttatattcacaaacagtgattttttatttttaataaaaatatatttcccttaccttgtttggattgaatctgacaccgttgattgataaatatacaagaagatatgcaaccaaaaggacgtttatgtacgacaccgtg

SEQ ID NO: 300 - DNA, 14168 bp, Diabrotica virgifera
atcagttggtctggtcaaaagtgcaaaaaactgatggtaaagagaaaatattcgtagtttaatactcaccagtgtgtttttattgtaaagaattgtttatctttttatgtactaagctttatatttagccccaaaatgggggactctttagaatccacggaagccagccacgaaacgcaaaatgtggctctagttgattttacagcattttcgaattttattttaaaagcgaccactgttcttttgccggaggatgacggccaagccgaaccggcaaacttagtggcagctatagatgataaagcaaatcaggaatgtataaggaaattcataagtgatccgcaaattgcaactttgtacatacagaggaactcttccaaagatgatgacagcgttcaaccgccagagggcgaggaagaaaaagagccagttacatattatgtcagcaatgaagtccattataccaactcaaaaatgtcaagtttagtatgcattaagagaggcccagtgatcgaagccgataaaagtattagagcccaagtccggctgatgaatttcagcgatggctcaccatatgaaatattacacgattatgtcagtagaacagttgctaccgttttttaaatcctatgtcaaagaatctggcagagctgatcgtgatggtgacaaaatggaccccgcaagcgaaaaaaccatcgctgaacttgaaatgggtcttttgcatctgcagcaaaatattgatattcccgaaataaccctacaagtacacccgtacgtggcaagcctaatcaaacaatgtgcagatgaaggcagaaaaccaaaagtagctgattttagtgacaaagtagatgattccaactttttgaaccagttgcaacatggtgtaaacaggtggatcaaggaaatccaaaaggttacaaaattggatagagatccagcctccggaacagctttacaagaaatcagcttttggttgaatctagaaagagctcttcaccgcattcaggagaaacgtgaaagtatggaagttgcactaactttggacatcctcaaacatggaaaaagattccatgcaactgtttcgtttgatacagacactggtcttaaacaagctatagctaccgtcaacgactacaatcccctaatgaaagactttcccatcaacgatttattagctgctacagaactggaaagaatcagagccgcagtccaactgattttcgcccatttgagaaaagtgagatcaacgaagtatcccattcagagatgtttgaggctcgttgaagctatttcaagagacttgggtgcccaattactcaaagttttgggcacgagaagactgatgcacattccgttcgacgaattcgagaaagttatgactcaatgttttgaggtgttttccatatgggaagatgaatatgagaagctgcaagctctattaagagatatcatgaagaagaaacgtgacgaacacatgaaaatggtctggcgtatctcaccgcaacacaagaaactccaaagcaggatggatcagatgcgtaagttccgaagacaacatgaacaattaagaactgtcatcgttcgagtgttaaggcccagcatcaaaggaagcgctgtgccgattgaaggaggcgacatcgaaccaccgaagccgactttctcccttgatgcagccgatgctaatgctatagaggaagtgaatttggcatacgaaaatgtgaaagaagtagattgtctagatatctcaaaggagggacaagatgcttgggatgccgctgtacaaagatatgaagaacgcattgacagagtcgaaaccagaatcacagctcatcttcgtgatcaactcggtactgctaagaatgccaacgagatgttcagaatcttctctcgtttcaatgctctcttcgttagacctcacatcagaggagctattagggaataccagactcatcttatacaaagggtaaaagatgacatcgaagctcttcatgaaaagtttaaggtgcaatacccacagagtaatagcgctaaaataagcaaagtgagagacattccgcctgttgctggttccataatgtgggcgaaacaaattgatcaccaactcaccacatatttgagacgcgtagaggatgtcttaggtaaaggatgggaaaaccatatagaaggccaaaaacttaaagccgatggagacagcttccgtctcaaacttaacacccaagaaatattcgacgattgggctcgaaacgttcaacaacgcaacttaggagtctccggaagaatatttaccatcgaagcagtccgttcaagaagcggtagaggcaacgtgttgaaactgaaagtgaatttcctaccagaaatcataactttggccaaagaagttagaaatctgaaatgtctaggattcagagtgccattggccattgtcaacaaggcgcatcaggctaaccagctgtacccatttgctatttcgctcatcgagagtgttaggacatacgagatgacgcttgagaagattgaagacaaagccagcattatacctcttgtagcaggaatgcgaaaagaggttcagcaggttattgcggagggcatacaactcgtctgggagagttacaagctggatccttatgtccaacgtttctcagacctcgtcgtaagtttccaagagagagtagaagaattggtgctagtaggtgaacagttagaagtcgacgtaagatctttggagacctgtccatattctgctaacacatttgctgacatcctgtcgaagattcaacatgctgtcgatgatctgtctttgaaacagtactcgaacttacatatctgggtcagcagattggacgaagaggttgaaaagaatttggcaagacgtctgcaagctggagtggaagcctggaccgatgcactgagcggccacaagaaggaaatcgatcacagcatggacaccgacgctccagctcagccgacacacaaaccaggaggagatccgcagatccaaaccatggttcaggaagttagaataacaaaccaaaccatgtatctgtacccaagcatcgaagaagccagatttttgatcatgcaacagttgtttgcatggcaagctatcgtcacatcccagcagaggttgcaaagtagcaggtatcaagttggcgtcgataaacctgttacagaaacctacaggaacatattaacgaagttgccgggtggagctcaacctctaaactcggcttacagtgcaattgcttccaaaattaaagaggttcaaaactacgtgaacgaatggttgacctatcaatcgctttgggacttgcaagctgataatctgtacggaaaactaggagaagatattggcaaatggatggaatgtttaaatgataacaaaaaaacccgtacgacatttgacacttcagacacccgtcgtgaattcggtcccattattatcgacttcgccaaagtccaaagcaaagtctctctaaaatacgattcatggcacaaagacactttaggcaaattcggtggtctacttagtaacgaaatgacatctttccacgccaatgtatccaagtcaagatcagacttggaactccaaagcatcgaggccgccagcacctcagacgccgttagcttcattacttacgttcaacagttgaaacgaagcatgaaggcttgggagaaacaagttgatatttacaaggagggtcaaaggattttggaacgacagagattccagttcccaacaaattggttacacgtggagaacttggaaggagaatggggcgctttcaacgaaatcatcaaacgtaaagattctagcattcaaacccaagtagccagtctccagcagaagatcgtatccgaagacaaggcagtggagagtcgcactaatgacttcttaaatgattgggaaaagagcaagcctgtcgaagggcatctcagaccagacgacgccttgtcacaactgcaactgtttgaaagcaaattttccagactcaaagaggaaagggacaatgttgccaaggctaaagaagctctcgagcttcaagatcctggcggtataagcaccagcgaagacagaatgcaagtcgtctatgaagaactccaagacctcagaggtgtttggtccgaattgtcaagaatatggcaacaaatagatgaaactagggaaaaaccatggctttcaattcaaccaaggaagctcagacagcagttggacgctctaagtacacaattaaaggaactaccagcaagattgaggcaatatgcttcgtatgagtacgtcaagaaaactttacagacatataccaaagttaacatgctcatagttgagcttaaatctgatgctctaaaagaacgccattggaagcaattgatgaaacaattacgagtaaactggatcttgtcagatttaacactaggacaggtttgggacgtaaacctacaaaagaacgaagccatcgtaaaagatatcattctagtggcacaaggagaaatggctttagaagaattcttgaaacaagttcgtgagtcctggcagaactacgaactggacctcatcaactatcaaaacaagtgcaaactaatcagaggatgggacgatttgttcaataaagtcaaagaacacatcaattcagtagcagctatgaagctctcaccttattacaaagtttttgaagaagaagcattgacctgggaagaaaaattgaatcgtattaatgctttgtttgatgtctggatcgatgtacagagaagatgggtttacctcgaaggaattttctcaggtagtgccgatattaaaactcttctaccagtggaaacctcgagattccaaagcatcagttcagaatttctgggattgatgaaaaaggttagcaaaagtcccatgacaatggacgtattaaatattccaggagtgcaacgagctttagaaagattagctgatttattgggcaaaatacaaaaagctttaggagaatatctagaaagagaacgtacttcattccccagattttatttcgttggagatgaagatttattggaaattataggaaacagcaagaacatcgctagacttcagaaacactttaaaaaaatgtttgctggagttgcttctatacttttaaatgaaaacaacaccataattacaggtatagcttcaagggaaggtgaagaagttcacttcaacaacccagtctcgactgtagatcatccaaagataaacgaatggctcacaatggtagagaaggagatgcgtgtaactttagcttcaaatttaacccaagctgtacaagatatcaagcaatttaaagacggcattgattcaaagagttacatgcaatgggtcgacaaataccaggcgcagatagtggtcctcgctgctcaaatcttgtggagcgaagatgtagaagctgctcttgtcaagatgaacagcgaacctcaaaaaggtcctctagaaaaagtacttcaacaggtagaaaatacactcaatgtacttgccgactcggttcttcaagagcaacctcaactcagaaggaagaagctggagcatctcataaacgaattcgtacacaaaagaactgtgactagaagactgatcgcaaacggagtttgtagcaacaaagcattcgaatggttgtgtgaaatgaggttctattttgatccaaggcagactgaagttttgaaacaattaacgatacatatggcaaatgcgaggttctactatggatttgagtatttaggagttcaagataggctagttcaaacaccgttgacagatagatgttatttgaccatgactcaagctttggaagctcgtttgggaggttcgcccttcggtccggctggtaccggtaaaactgaatcagtcaaagctctcggcaatcagctgggacgtttcgttttggtattcaattgcgacgaaaccttcgacttccaggctatgggaagaatatttgtgggtctctgtcaggtaggagcttggggatgtttcgacgaattcaatcgattggaagaaagaatgttatctgccgtttcacaacagattcaaactattcaagaagctttgaagtcgcagaaagaagctgctgctgaaggtgttactacaggcagcattagtgtagaattggtaggaaaacaagtgaaagtgtccccagacatggctatcttcataaccatgaatccaggttatgcaggaagatccaatttacctgataacttaaagaaattgttcagatctttggctatgacaacgccagacagacaattaattgccgaagttatgttgttctctcaaggattcagacaagctgaaaaattggcttcgaagattgttcctttcttcaggttatgcgacgaacaactatccaatcaatcccactacgacttcggtttgagagccctaaaatccgtacttatatctgccggtaatgtcaagagagaccgaattcagcggattaaggaaggaatgacccaacgtggcgaaaccaacatcgatgaagccagcatcgctgagaatttgccagagcaagaaatcttgatccaatcagtgtgcgaaaccatggtacccaagttggtggctgaagatataccacttctcttcagtttgttgaatgatgtattccctaatgttcagtacacaagagcagaaatgaaaggtcttaaggatgaaatcagaaaagtatgttctgaagagtatttggtatgtggagaaggagacgaacgaggatcagcttggatggagaaggtacttcaactttaccaaatatcaaatttgaatcatggtttgatgatggtcggtccaagcggttccggtaagagttcggcatggagagttcttccttaaagctcttgaaagattcgaaggcgttgaaggagttgcacatgtcatcgatccaaaggctattagcaaagaagcgctgtatggtgttttggatcccaataccagggaatggacggacggtctcttcactcacatattaaggaaaattattgacaacgtcaggggagaaattaacaaacgtcaatggatcatcttcgacggtgacgtagatcctgagtgggtagaaaacttgaattcagtacttgatgacaacaaattgttgactctgcccaacggtgaacgtctttccctacctccaaacgttagggttatgttcgaggttcaagacttgaaatatgcgacactagccacggtttctcgttgcggtatggtctggttctctgaagatgtcttgtcaactgacatgattttcgaaaactatattcttcgtttgaggaatatccctctggaagaaagcgaagatagcggctttggcaagaaaaacgacaaaagacgatatgctttctcccactcttcaactacaagtcgacgttgtcaatctactacaaccatacttatcacccgatggtctagtcgtacgttgtctggaatatgcgatggaacaagaacatattatggacttcacacgtcttagagcactcagctcgttattctctatgttaaatcaagccgtaagaaacgttctccaatataaccacatgcatcccgactttccattaaccaatgatgtcttagacaaatatattccaaaatgtttgatatattccatcctttggagtttcgctggtgacgccaaactgaagattcgttctgatctgggagattttatcagatctgtaacaacggtaccgcttcctccagacaacaacatgcctataatcgactacgaggtcaccatcgagggagaatggtcgctgtggtccaataaagtgccacaaattgagattgagacgcacaaggtttgcttcacctgatgttgtagtgcccactttggatacagtaagacatgaatccttgctttatacttggttagccgaacataaaccattagtattatgcggtccacctggatctggtaaaacgatgactctattctccgctttaagggcgttacctgatatggaagtggttggcttgaacttttcatctgctacaactcctgaattgctgctgaagacattcgaccactactgtgaatacagaaaaacgcctaatggtgtagttttgtccccaatacagttgggcaaatggttagttctcttctgtgacgaaataaatttaccagacatggacaactacggcacacaacgtgttataatgttcttgcgtcaaatcgtggaacagaaaggtttttacagagcctcggaccaatcctgggtctcactagaacgtatccaatttgtcggtgcctgtaatcctccaactgatcccggcagaaagcctctatcccaccgattcttgcgacacgttcccgtcatttatgtagattatcccggagagacatctttgaaacagatctacggtactttcaccagggctatgttaagattggcgcctggtctgaaaggttatgccgaaccattgactaatgctatggtggaattttatttggcatctcaagatagatttactcaagatatgcaaccacattatgtttattctccaagagaaatgaccagatgggtaagaggaatttgtgaagcaataaggcctcttgataatcttgctgtggagggtttggtaaggctttgggctcatgaagctctccgtctcttccaagacagattagtcgaagacacagaaagacgttggactaacgaaaacattgatgctgtagctttaaaacacttcccatcagctaactgcgagaaagctttggaaagacccattctttacagcaattggttatccaaggattatgtacctgttggaagggaacaactaagagaatatgtaaaggccagactgaaggtgttctatgaagaagaacttgatgttcctttggtgttgttcgatgaggtgttggaccatgttttaaggattgacagaatattcagacaacctcaaggtcacttactactgatcggagtttctggtgccggaaaaacaactctgtccagatttgtagcctggatgaatggtttatctatattccaaattaaagtacacaacaaatacacagcggaagatttcgatgaagatctaagatctgttttgagaaggagtggatgcaaacatgaaaagattgctttcattttggacgagtccaatatgttagattccagtttcttggaaagaatgaacactctactagctaatggtgaagttcctggactttttgaaggagatgaatatactactcttatgactcagtgtaaggaaggagctcaaagggaaggtttaatgttggattcaaatgacgaattatacaaatggtttacacagcaagtaatgcgtaatctgcatgttgtcttcaccatgaatccctctaccgatggtctgaaagatagggctgccacttctccagctctgttcaacagatgcgtcttaaactggttcggtgactggtcagatggagctctcttccaggttggtaaagaattcacgaatcgtttggatcttgaaaaacaaagctggagatgtccagacttcttcccggctgcttgccatcacatctcagcgtctcctactcatagagaagctgtcatcaatgcctgtgtgtatgtacatcagactcttcataaagcaaacagtagattggttaagagaggaagccgtaccatggcgatcactccaagacattacttagattttattcatcatctcgttaaactgtacaatgagaaacggtcagatctggaggagcaacagttgcatttgaacgttggtctgaataagatcgccgaaactgtagaacaggttgaagaaatgcagaagagtttggccgtcaaatctcaggagccacaggccaaaaatgaagctgccaacgctaaactcaggcagatggtgaaagatcaacaagaagccgaaaagaagaaggtacagagtcaagagattcagcagcagttggctgaacaaacaattcacattgaacagaaacggtcagaagtaatggctgatctagaacaggtcgaacctgccgttattgaagcccaactagctgtaaaatccatcaaaaaacaacaattggtagaaatccgtactatggctaacccaccagctcttgtgaagttggctttggaatccatttgtttactgctcggtgaaaatgctagcgactggaagtcgattcgtgctgtaattatgagagataacttcatcaacaccgtggttaacaacttcaacactgaagatattagtgatgatgtaagggaaaaaatgaagaaccgctaccttagcaatccagattacaacattgataagatctaccacgccagtaacgcttgcggtccacttgtcaaatgggcttgtgcgcaagttcaatacgcagacatgctcaaaaaggtcgagcctctccgtgaagagctcaaatctctagaacaacaagctgaaaccaaccaaaagagaggcgaagatgttaaagcactcattagccaattggaacagagtatcgctgcttataaagaagaatatgcacaacttatagctcaggcgcaggctataaagactgatttggaaaatgtacaagctaaagtagacaggtcaatagctcttctgaaatctctggtcatcgaaagggaaagatgggaagccagcagtgagactttcagatcccaaatgtctaccatcatcggtgacgttcttctatcggctgcatttatagcatacggcggttactttgatcagcattaccgtcaaaatctgtttagcacttggtgtcagcatttaactcaggccagcatccaatatcgagcagatatcgctagaacggaatatctgtccaatccagatgaaagacttagatggcaagctaatgctttaccaacggatgatttgtgtactgagaacgcaattatgttgaagaggttcaacagatatcctcttattatcgatccttcgggtcaagctactgaatttataatgaacgaattcaaggataagaagattaccaagactagtttcttggatgactctttcagaaagaatttagaatctgctttgcggtttggtaaccctcttcttgtccaagacgttgaaaattatgatgctattcttaatccagtactcaacagagaactgaggagaactggaggtcgtgtcttgatcactttaggtgaccaagacatcgatttgtcaccatcgtttgttatcttcttatcaactagagatcctactgtagaattcccgcctgatatatgctctagagttacgtttgttaatttcacagttactagaagttccctccagagccagtgcttgaaccaagtgcttaaagctgaaagaccagacattgatgctaagcgttcagatttattaaaactacaaggagaattccacttaagattaagacagctagaaaagtctctgttacaagctttgaacgatgcaaagggtaaaatcttggacgatgacagtgttatcacaactctagaaaccctgaaacaagaagcagcagaaattggtcagaaagtcgaagaaaccgataaggttatttctgaaattgaaacggtatctcaacaatatctaccgttatcacaggcttgcagtaatacctacttcaccatggacagtcttaaccaagttcatttcttgtatcaatattcactcaagatgttcttggatgtttttgccactgttttgcataataactctcagctggatggaatcagcgattaccaagctagattgaacctcatcacatcaaatttattctctgttgtatatgaaagagtggcaagaggtatgctccacaacgatcgacttacatttgcaatactactctgtagaatccacttgaaaggacagctaaccgaaccgaatttggatcaagaattcaacttcttccttagaggcaaagaaggtgttttcagtaacaccggtgcattcgctaccgatggattgaacagcgatcaacaagaagctgtcgttagattatcgacaaaattaccaacatttaagaaattagcgaaccaaataaaggaaatgcctgaatttggagcttggttgcaacaaggaagtcctgagcaagcagttccacaattgtggattgaggaaaaacaactcagtgcagtgggtagagcaatgtaccaactgctggttatccaagccttcagacctgatagagtaatagctgccgctcataacttcgtatcagtcgttctgggagcagacttcatgtacttggcagaaaaagaacttgaatttgccgcatgcgtcgaaaaagagattagatctaacgttccagcacttttatgctcggttcccggtttcgacgcttctggtcgtgtcgatgatcttgcagccgaacttaacaagcaaatatccagcattgctatcggatcagccgaaggattcaaccaggctgatagagctataaatatggcctgcaagactggaagatgggtcatgctgaagaacgtacacttggctcctcaatggttagtccagctggagaagaagcttcattcacttcaacctcacgccaactttagactattcctcaccatggaaattaatccgaaactaccagttaatcttcttagagcaggaagaatatttgtattcgaacctccaccgggtattagagctaacctcttgagaacattcagcacagttccagccagtaggatgatgaaagcaccaaacgaaagagcaagactttacttcttattggcgtggttccacgcgattgtccaggagaggttgagatattgccctctaggttgggcaaaacattatgaatttagtgaatcagatttaagagttgcctgtgatactttggatacttggattgatacaacggctatgggaaggacgaacttgccgccagagaaagtcccatgggacgccctagtcactctgctctcgcaatccatctatggtggtaaaatcgataacgatttcgatcaacgactgttacattccttcctgaataaactttttactcccaagagctttgagagcgactttgctttagtggcgaacatcgacaacggacctggtggaaatagacacattacaatgccagatggtactagaagagatcacttcttgaagtggatcgagagttttgctgatagacaaactccagcttggttgggattaccaaataatgctgaaaaggtcctattaacaactagaggtaccgatttaatagccaaactattgaaaatgcaacagctggaagacgacgacgaattagcttactctattgatgacagctcgcctacagatcatgctgaaattgacggtagaccgtcttggatgaagactcttcataacagcgctcatacttgggttaacttgttaccaacttctcttcagaccttacgaagaactgtcgaaaatattaaagatcccctttatagatatttcgagagggaagtcaactctgcttccaaacttctcattgatgtattacacgatcttaatgatgtacttttgatttgtcaaggggacaaaaagcaaacgaattatcaccgactgatgttggctgagctagtgagaggtattattcccaagaattggcacagatacaccataccgaaaggatgtaccgtcatgcaatggattaccgatttcagtcagagggttaagcaattgcaaaaggtgtctcaagtagtttcttcttcaggagctaaagagttacagagtctccctgtatggttgggtggattactaaatccagaagcctacataaccgccacaagacaatgcgttgcccaggcgaacagctggccattggaagaactccatctagacgtaacaatcacggatagtaccgacaaagattctattcctcacgattgttttgctgtcattggtattaaactacaaggtgctcaatgtcgcaacagtcaacttttactcacctccagcatcatgatagaactaccaatcactcttttccgatgggtccgaatggcgactggcgacgagaaactcaaagagggaaaactgtctcttcctctttatctaaactccacaagaacggaattgttgtatacagtagaactgaatatagcagctggacaggacccacacagcttctatgaacgtggcgtagctttacttacatccacttctttgaactaaatgttgtatcgttaatatactatttattcgagctttaatattaatcgtctatttattttttgtttacaatattatgaga

SEQ ID NO: 301 - DNA, 1128 bp, Diabrotica virgifera
atttaatctaactaatttgcatagaatataacgctgtttaaaaatgaccgaaaaacaaccaaaacaactatctgctgccgaagccgaattatatgacagacaaatacgtttatggggaatagagtctcaagaaaaattacgtgcagctaatgtgcttttgattaacatacgagctcttggatctgaaattgctaagaatattttgttatcaggaatcaactctctgacaatattagatgatggaattgtcacagagaaggaacaagctaagaattttcttattgctggaaataggaccggagataagatagctgaagctgtattagaaagagctcaagcgttgaaccccttggttacaataaaagcagattcagattctccagcatcgaaagatcccagtttctttaaagatttcacaattattgttgccacatgtgtaaaaactgatgtgttactcaaaatcgataaagtatgtagggcaaataatatcaaactaattgctggagatgtgtttggactgtttggatattctgttgctgattttcaaaatcatcagtatcatgaggatcaaatccagttaattaagaaaggaaagaagaggactcataaaggtgagaaagtcactgttaaagtccagtgtgaaatcaactatccagatttaaacaaagttctcatactgcctaatacaaaacaaaatattgatagtataaagaagtccaaaagaagaaatgatttgttttacctcgttttaactttgcttgaattcagaaatagagctgaacgcaaccctgaggccagtactgaacaagaagatataaaaactctgcaaaagatcaaaaatgagatttttgaattgtaccaagtagatgaattgaaatcaaaactaacagacaaacattttgatcttgttttcagtgaaataggtccagtgtgtgccattttgggtggtgttatagctcaagaagtcatcaaagctgtttcccatagggaagtgcccataaataatatgtttttgtttgatccgattacatacgacggaacagaagaaaatgtaggtgcttaaatttgctctgtaattattgtaccttacaaattagcaaaatacttgtgttttaatttttcgttaat

SEQ ID NO: 302 - DNA, 2506 bp, Diabrotica virgifera
gaaaaagattaagaaggaagctgtaaagaaagagccagtaaagagagagaaggcagaagctgatagtccaaagaaaaagaagaaggaagaagaaacgcaggaagtatggaaatggtgggaggaggagaagaaagatgatggtgtcaaatggacattcttggaacacaaggggcctgtatttgccccagattatgagagactaccaaaggatgtcaaattctattatgatggaaaagaagtggcattgtcggaagaagctgaagaagttgcaggattctatgcaaaaatgttggatcacgattacaccaccaaagaagtatttaacaaaaacttttttaaagactggagaaaggtaatgacagatgatgaacgtgcccttataactgacctgaaaaagtgcaattttaaaaagatgcatgcctatttcatggatgtagcagagaaaaataggaacagatccaaggaagagaaaaaggctttgaaagagaagaatgaggctatagtcaaagagtatggtacttgtaatattgatgggcacaaggaaaagattggtaactttaggctggaacctcctggtctttttagaggtcgaggtgagcatcccaagatgggcaaactgaagagacgactcaatgctgaagatatcataattaactgtagtaaggattccaatatacctcaacctcctcctggacataagtggaaggaagtccgtcatgtaaatactgtcacatggttggtttcttggacagaaaatgtacaaaatcaggtcaaatacattatgctgaatcctagttccaagttaaagggagaaaaggattggcaaaagtatgagactgcacggagattgcacaaatctataaataagattcgaaatgagtaccaacaggattggaaatcaaaggaaatgaaagtgagacagagagctgtggctttgtacttcattgataagctagctctcagagctggtaacgaaaaggatgaagatcaagctgatacagtgggttgctgttctttgagagtagagcatatagagcttcatgagcaaaaagatgataaggaatttgttgtagtctttgattttcttggtaaagattccattaggtattataatgaggtaccagtagaaaaacgagtgttcaaaaacttgggtcggtttatggaaaacaaaaaacctggcgatgatctctttgacagacttaatacacaaattatgaacaaacatctgaatgaacttatggaaggtcttactgctaaggtattccgtacatacaatgcttcgtttacactacagcaacaattagatctattaacaaacgaagatgatacggaagctgaaaaaattttggcctacaatcgagccaatagggcagttgccattttgtgtaaccatcagcggtccgtgccgaaaggccacgaaaaatctatggaaaaactaaaagagaagatggatcaaaaacgggaggccatacaagatgcagagagacaggtaaaagacgccgtcagagaagcgaagcacggcagcgtcaaagagaaagtagtcgccgacaaaaagaagaagctccttcaacgtcttaaggaccagctcgcgaaactcgagatccaagaaactgacagagacgaaaacaaaaccattgcgttgggtacttctaagctgaactatctcgatcctagaattagtgttgcgtggtgcaaaaagtacgacgttcctatcgaaaagatttacaataaaacccaaagggataagtttagatgggccatcgatatggcaggaccggattaccggttttaagttaggatttcttttttttcaaaagagtgtatggtagaatttaaaactggaaggatcagaaaaatgtataaagatttattatggcgtatttgctttaatatatacaaggtggtatataggacacgttttcatcacacaatcttcaaccggaatattttgtaattataactcaatttgtacaaaataatgtttcatactataattttgttaaactcccatctattgttaaacatagaacttaaaataactttctgattattgaactaagccaccttggtcactggaccaccttaatgtcacatgtttaatgacattcttcttgcagtgcctatccgttccggatgttggcgattaacttggctgtccttattttgttggcagctattcagaataatcgaagtctacacctattgaaccattttctcaggtgctggagccaagaaatgcttctctcaggttctctttttctacactttgccctgaagaacgagttaaaacaagcccatttctcttaatgcggtccagatattctaatttgtgttcttttattgtactataacgcatgttgttctatgatactataacttttgtgaaatcccatttgtgcaacaggttggtcattatcgaacttatttgatagtctgttggtaattattttggtaagcagtttgtacggatgtggtaacaggctttaattttcgagtctctaatttt

SEQ ID NO: 303 - DNA, 2407 bp, Diabrotica virgifera
aatcgagataaatcagttcacctaaaacgggaaaaactgtttaatttgttggtgtctaattaacaattaattttctgtcgcttataacttaatgtattgttggaagtgtaatcgtgaatcaattagttgtaagtgcagtgttttttagtgctttttttgttattgttgtgccatgtgatgcacagaagatggtagatagaacttggttgaggaaacttttcgctgatttcgcagaagctaccgttttgtgggcatatcatcccatatacacgtacgaaccctcttcccttatcggaaacaccactggtgttttccccaatgtgccgtcgcagccaggaatgccctgccagggcgaggacagaagtatttatagaagaggagcacgtcggtggaggaagctttatagggttaatggacacatattccaagctaaaagattcaataggagagcattttgcgcgtattgtaacgatagaatctggggattaggcagacaaggtttcaagtgtatccagtgtaaacttctcgttcataagaaatgccacaaggctgtaaataaaccttgcacgagtgagcatcaagaaccagtaattcgagaagaccacaatggggaagcgcaagcgaataatacgccgataaccgagtccaagtgggagatacgagaaaaagattttccggaacctccgccagatgtcactggcgaatctgttcccgtagaagaccccaacaagcctgtcgacgatttagaacccggctctcaacgccaatattccctgaacgatttcgaactgatccgcgtaatcggccgcggctcctacgccaaagtcctgatggtagaattgaaaaagacaaaacgcatatacgccatgaaggtgattaagaaggctcttgttaccgacgacgaggatatcgattgggtgcaaaccgagaaacacgttttcgaaactgcttccaatcatccgtttctggtcggattgcattcgtgctttcaaacgccttcgagattgttcttcgttattgagttcgttaggggtggtgatttgatgtttcatatgcagaggcagaggaggttgcccgaagaacatgcgagattctatgctgcggaaatctccctcgccttaaacttcctccactgcaagggaatcatctatagggatctgaaactagataacgtactattggatcacgagggtcatatcaagttgactgattatggtatgtgtaaagaaggtattaggccaggcgatactacatccacgttctgcggtacgcccaattacatagctcccgaaattttaaggggcgaagactatggattttccgttgattggtgggctttaggtgtcttgttgtacgagatgttggccggccgctcgccattcgatatagcgggagcgtctgaaaatccagaccaaaacactgaagactatctattccaagtgattctcgagaaaactattcgtatacctcgatcgcttagtgtgaaagctgcgaacgttttgaaaggattcttgaacaaaaacccggctgacaggctaggatgtcacagccctgaagctttcattgagattacgggtcatcagtttttcaaaagtattgactgggatatgttggaacagaagcaagtaccccctccctataaaccacgattggactcagaaagagatttagccaatttcccaccagaatttaccgatgaacctgtacaccttacaccagatgatccacgggtaatcgagaagatcgatcaatcagaattcgaagggttcgagtacgtgaacccgctactcatgtcgttagaagattgcgtgtgacataacgtcctctgtgcattgcatccctccaacctgcctccaccgccaccaccggcggcggcgcaccgttatcctcctccgttgttcccgccaccgccgcctccggacctgggggactccgccgtggacatcggcaacgggggacactacctgcaggtggacgtgagaccgcagcccgccaaatctttacttcaaaatatcttttgccttcctctcaactagtgctttagtgtctatttcaaatcgaaaagtatttatgtatttatttagtacttaatcgtttattatttcttctttagtttattagggtgctcaaatatagaatgtattatctaaccgagttcagtattgggctaacccgtacctgtactccttccacattgacaaagtgtcatgtctgccgtcgagtcctgctctgccgcattttgtattgtattatatggaagggttcggtttgtctgtcaaaattgtcgttttctaatgaaatagtacacaatatcaatcaaaacactgaaaacgtttgttatgtatacttccacaaaatttattataactatgtgactacagctgtttcggcagagtgcctttctcaa

SEQ ID NO: 304 - DNA, 2475 bp, Diabrotica virgifera
aaaaaaaactaatttattagtcatcccactttgaatcatctgtcggcaaaattcggtgaattttaacaaaaatattatataaatagatcggtatcgttccagaagtttggaattgtgctttttgctactttttgtataatagtctagtttatatttctaaagatgagtgtactaggttttagtgacattgttaacggaccgttagctcaatatctgcaactttccgcccaaattggcggagatgtggcagagcattcgaatttggttaaaaatgcatttaacgcccaatacaaattcatagaattggccagtcaatcttccaaacccgcacccaacgatttaaacaactttttggttccaacaagcgatagtattcgacaaatccaagagtttagggaaaaacatcgcacttcccaatattttaaccacttatcagccatcagtgagagtattcctgcattaggatgggtcacagtaagtcctacacctggcccctttgtcaaggaaatgaatgatgctggacagttctacaccaacagagtactaaaagactggaaagaaaaggataagaagcattttgactggaccaaatcttgggtgcagaccctgtctgaccttcaagcttttgtgaaacaatatcatactactgggttggtatggtcaggcaaaggagctccaccgaaagctggtggtcccccaccacctccgccaggatgtcctccacccccacccgtcctcgacttggccagtatgggaggagcgggagatgccagtcaagatcgttcggcgctctttgcggaaataaacaaaggacaagatattacaaagagtttgaaaaaagtcacttccgatatgcagactcataaaaatccaactttgaggcaaggccctgcacctttcaaaccgacaactcaacagacaagcttgtcatctgtcaaacctgcacaggttgataaagctccggttttcaaccaagacggtaagaaatggatgatcgaataccaaaaaggcaatcacaatctgttggttgaaaatgccgagatgaataatgtcgtttacctttataagtgcgaaaattctactgtacagatcaaaggaaaaattaactccataacgttggattcttgcaaaaagacctccgtggtgtttgattcacttgtgtcttccatggaatttatcaattgccaatctgtgcaaatgcaggtattgggcaaagttcctaccatctcaatcgataagactgacgggtgccaagtatatttgagtccgcaatcattggatgttaacataattacttcaaaatcatcagaaatgaacgtactgataccaaaaggagacggagattacaccgaaattcctgtaccggaacaattcagaacaagtgtgaacaccaaaaacaacacccttacaaccgttgtaatcgaaaacaagggataaattgttcgtgtttaatatttatgaactacatttacgtctaacaaattttataatttttatttttcagtattcgtatcttcggctttgaaatatttatttttacgcttagctaaggataaaaagattagtggtattcatagtatgtaaagttataattttccagggactatggaattagattattacaaaatatttgttgatattgaaatagaaaggaacaatcaataacaacggtagcattttcttcaattcttttattactcctataaatgtgcaacattatgaaggtaatcgaagatctacttttgtcatttttaattgttactaacagcattcttaatttgagtactaaaaaccgttgtagtaatttttgcgatattattaaggctgattcctatgtacataaaatttgttagtagtaaagtatctgtttagaataaatgatatttataatattaataacttaagcaatttcatacatttataatcgattagatgagttattgtgaatatctatttagagcgaaaaatatgaatgtcaccaaaaagctgtagtactaatctcaaaaattttttggaaccttatgaatatgtgcaacaaaaacgctgaaagtgtcaacagtatcatgtcatccacaccaatcgtttgttaattagtatataggctacaaaaatactttcagaagtatgtaaaaaaaaaagatttctgaaaattggtttcgttgcaattacttttccgtagaaaaaccgataccacaagtattattggtaccttttatataatttcttttcattaaaaaattttagtttacttgaaaccaacatttatgaatgaatgtgcattacacaagatcaacaaatggtacagtttgtttaggtgcttaagctgatctagagagagtaactatatactaaaaaataaagcgttagatcccatttaaagtaggtaacttaatagaatcttcagtttctttttttttcagtgtgaaaactgtttgcttataaacgacttaaggtactagtacacttagaagacca

SEQ ID NO: 305 - DNA, 2423 bp, Diabrotica virgifera
ttcatacaacattagctcttcctgatgaatgtagttctatttcgcctgtaagaagttgtttactgaggacaaactacatagatatacggctgtggagatattacgctggctatttttgctacatttatacaaatgaagccaggttggatatcaaatataattccactagttacaacataacatgtggcggtgaaaacgcaacgattcccgtagcaagggtggaggagaacataatagctagttatgattatacagataaagaagatgtccagcatatcagaaaatcgtttaagactgacgaggtttttaaaaattatatatcttgttgccaaggagctataaggtgttgcaatgatcacatggacgaggaaaatgttattccaactttaacttttacatttagcattgtatgggcgataatcatgggcgtaaaagatgctcctcattgttggatggtggatttagatggcctccagtggaccgttgatggttttagaatagctgtcttggttatcaacggaataatgttagcagatattataagagtgatgatattaaaactgagacacggaagtactaccaaacaaactatggctgcgtttagagcaacaatctttttgatcccactttttggtcttcacatcatcgtaaccgctaaaaagatcgtttacgataactcttgtactgccgaagacatttacgactttttcagatatgccatggagggcttgcaagggatcatcgtgtctatattgttttgttacgcgaataatgaggtacggggtgaaatgaaaaacggttatagaaaagcctgcatctacctaaatcaaaggtttggctggaatttgggaggtgatctcctctatgataaaagacgagccacaacagcaacttttgttcaagaaggaaatttttaaacattctacaactttactcactaaaaaataagagcctggctttaatataaaattcacagataaagtacataagatctagaatttttttaagaaaaatatacagggtgtccagaaactctaccgacaaacgaagacagaacattcctcagataattttaagacaatttaaccaattcacctagtccgaaaatgcttcctaagggagctagagctctttgaagatggcgtcttttaattagtttttcttaaatacctccagaacagttctaattagaaattacaaaccggtgaatttacctttctcttcttagttatttaagacctcataattaaagatgtctaaagtaggatgttcttcaacatcaagccaacaattcgagggcgaagcaccctcctctgtggcccaaaagatgtgggaaatgtctaatgctgtggaagttgtaagttcagtagatgaaatatatcgttacgataaaaaacagcaacaagatatcctagtcgctaaaccatgggaaaaagatccacattttttcaaagatatcaaaatttccgcattagctcttttaaaaatggtcatgcatgcaaggtctggaggaaccctcgaggtaatgggattaatattaggtaaagtagatggaaatacaatgtttgtcatggactcttttgccttgccagtagaaggtacagaaactcgtgttaatgctcaagcccaagcttatgagtatatgagttcctacatcgaagcagcaaagttggtaggtagacaagaaaatgcaataggctggtaccacagccatcctggctatggttgctggttatctggaatagatgtaagcactcaaatgttgaaccaaaacttccaggaaccttttgttgcaatagttatcgatcctgttcgcaccatctcagctggaaaagtatgtctaggagcttttagaacttatccaaagggctacaaacctgcaaatgaggaaccttctgaataccagactattcctctaaataaaatagaagattttggtgtgcactgcaagcaatactactcattagaggtatcgtactttaagtcagctttagataggaggttattggattctctttggaacaaatactgggttaatactcttagttcttctagtttactaactaatgcggattatactactgggcaaatatttgacttgtcggaaaaattggaacagtcagaagcagcaattgggcgttgcggttgtatcgtaacaggagaaaaacgaaccgaagacaagttgttaaaagcaaccaaggatagctgtaaaaccaccatagaaatcatacatggactgatggctcaaatggttaaagatagattgtttaatagtgtgactcccagtaatcgtatacagtaaaattagtagatatttccgtggatgagttttttgttttgttcgttgtcatataacagtataaacgacattctttttcatcttttgaaaacttgaaaataaattattagttcaataaattttt

SEQ ID NO: 306 - DNA, 3026 bp, Diabrotica virgifera
atgataatgaccaaaatatcatcgaaaaaacacttttgattagatctagagtgtcatctgcaaacaatcgaaaacagagattttgattacttaatgtcataaatttggcaaagtctgccaagtttatttttacccttaattttttatctatttggaaaaactgagaaaaacggctacaaacaaacagttacttcgaatgattgccagtgcatgctgagtgtgtctcactgtatttgaactttagtttgttgtacacaataccagcacgcatgatatggccgcttatataaatcgcacaatatccgtgatgtctggtggtgacggaccacacaatagaccacccgtcacggccgttttgacagaacgaggaaaacgtatcccacttgacaattctcctttgcagatattcgtcaaggcgaagaagaagattaatgatatatttggcgagatcgaggagtatgtcgaggatactgtccagtatatgcatgaaatcgaaaaggatgaaaagatagtgaatagtgaaaaagtaaagaatacagaagagtatgttagcaaagtacacagtatcagagatgtattacagcgggatcacatgaaagtcgcctttttcggcagaacatcaaatggaaaaagttctgtaattaatgctatgctgggagataaaattttacctagtgggattggtcatactaccaattgtttcttacaggtagagggagctccttcagatgaaccgtatctagttttagaaggttcagatgaacattgtgctgtagaatctgtaggacaactggcgcatgcattatgcaaagaaaaacttaacgaatcatccctggtcaaggtttattggccgaaaaacaggtgccttctacttcgagatgatgtcgtgtttgtcgattcgcctggagtggacgtcactccaaatttggacgaatggattgacaaacattgtttagatgctgacgtatttgttttggtagctaacgcggaatccactttgatggtaacagagaaaaacttcttccacaaagtatcaaccaagctatccaaacctaacattttcatcctgaataaccgatgggatgcctcggcttcggagcccgaatttttagatcaggtccggaaacagcatcaagaacgagcagtcgatttcctcgtcaaagaactaaaagtgtgcactcccaaagaggccgaagaacgaatattctttatttctgctaaagaaatgttgcaagtgaggatggccgaaggaaaatccaattcgatatccctaccagaaggtttccaaaccagacattttgaatttgaagacttcgaaaagaaattcgaagagtgtatttctaaatctgcggtaaagacgaaattcgaacagcattcgcaaagagggaaatatataacgaacgaattacgggacatattggaaggtatattgtccgatgctttgaaattaaaagaagataaattatgtcaacgtaaagagttaaatgacaaaattaactatacggaacagcagctaatggtagtaactcaagaaatgaagaaaaagatacatagtatggtagaagatgttgaacaaagagtttcaaaagcgctaagtgaagaaattcgcagattaagtacgttagtagacgaattcaacctacccttccacccagaaccattagtgctaaacgtctacaaaaaagaactgcaccttcacgtcgaaacggggctcggttcgaatctgagagctagattatcgaccgcattggctcttaacatggaagctagtcagaaagaaatgactgagagaatggaagctttaataccggaaagtcataagatggcgtccagcgttgtactgccaagaagacaacctttcgaaatattgtacagattaaactgcgataatctctgtgcagattttcaagaggatttagagttcaggttttcgtggggattaaccagccttattcaaaaatacgccggtagcggggccaatttcctagcactgagaaacaaacgggagagccctactagccccaatattccttcaactcccacagatgtcgtcgacggtagattgctctacgccagcaccagcatagacgagtggtcgttgctctcgaggttagccattatgggagcctcctcgcagggcacaatgggcggcctactggtagcaggatttttgtttaagactataggctggagaattcttgctataactggtgcaatgtacggttgtctctacctgtacgagcgtttaacgtggacaaacaaagcaaaagaaaaatcttttaaaaagcagtatgtgcagcacgcctccaagaaattaaggatgattatagatctgacatccgccaattgcagtcatcaagtccaacaagaactaagtggtaccttcgcaagattgtgtcaagtcatagatgataccaccagtgtaatggacaaacaattagtagaattagaacaagaattaaaccgtttagaaagtgcaggtagtaaggctaaagtattgagaaataaggcaaactatttaacccatgaattagaacttttcgataaagcgtatcttaggatgactcactagaaatgatatttaccaaattagatttttgactttaaatattggtatttaaatggctcagtgtagcgagaatatgaaagaaaaaaaatgtaaattatctatatttattttgaagaaaccttaacaaaaactgcaaaaaaaaaaaaaaaaaataaaaaagaatctggtactaaccgaagttgttaaggtttctgattattatcttatcttatttgatcgattttttctgacgatacctctatacacgtagcctaatgttttgtgatagaattaacattatatatttaagtaattataccttattatatattacattttattcagttaaacgtttttatattctgaaaaatctaagaacctaggatgtgacacttctgcaaactctgaaagggatctgtaaatcttaacttgaactttatatcctaaatggataaatcaaaacgtttgtatacaacaa

SEQ ID NO: 307 - DNA, 7693 bp, Diabrotica virgifera
cgttttatgacctcttcaaattaacgactacgattgagaaccatccacacacatagcgacccgaataccacccaaacatggatcaaatcccccctccaaaggaggttaagatcctcgaaaccgccgaggatatccaggaacgtcgtcaggaagtcttatcccgctacgacaacttcaaagccgacgctagagctaagagggagaagttagaagattccagaaggttccaatacttcaagagagacgccgatgaattggaatcatggattttggagaaactacaggcagctagtgacgaaagttacaaagatcctaccaatttgcaagctaagattcagaaacatcaagcctttgaagctgaagtcgctgctcatagcaatgctatcgtcgttttagacaatactggtagagagatgatcaatcagaaccattatgagagcgaaactatcagaagacgtttggaggaacttcatagactttgggaacaacttctttccaaactggccgaaaaaggcaccaaacttcaacaagctctagttctcgtccagtttattcgtcattgcgacgaagtcatgttctggattaacgaaaaaagcgcttttctttccgccgaagagtttggccatgacttagaacacgtagaagtcttgcagcgcaaattcgacgaatttccaaaaagacatggcttcccaagaataccgagttacagaagtcaacgaactggctgataaattgctacatgacggacacccagagagagaccaaatcatcacaagaaaagaagaattaaataacgcttggcaacgccttaagcaaatgacgttgatgcgtcaagacaaactctatggcgctcatgaaatccagcgctacaacagggatgccgacgaaactgttgcatggatcgccgaaaaggatgttgtgctatcttcagatgattacggtagagatttggcaagtgtgcaagctttgcaacgtaagcacgaaggcgttgaaagagatttggcagctttggaagataaagtatctaccttgggtaaagaagcagatagactgggagctatccacgatgaccatggcgatgtaattcaatctaagaggtcagaaattcaagattattggcacagtttgactgctaaagccaaggaaagacgtgaaaagttggaagaatcatacgcccttcaccgcttcctagccgatttcagagacttggtccactggatcaatgacatgaaagccatcatttccgcagacgaactggcgaaagatgttgctggagctgaagccttgttagaaagacatcaagaacacagaggcgaaattgacgctagagaagacagctttaaatccaccaccgaagctgggcaagctctcttggacaaaggacattatgccagtgacgaagtcaaagaaaaactgtctatgttggaatctgacaagagatctttgatttcgctttgggatgaaagacgcattttatatgagcagtgtatggatttgcaagtcttctacagagacacagaacaggctgacacctggatggcgaaacaagaagcgtttttagccaacgaagaccttggcgattctttggactctgttgaagctcttatcaagaaacacgaagatttcgaaaagtctttggcagcacaagaagagaagattaaagccttagatgaatttgctaccaagttgatagatggcgaacattatgcggctgatgatgtagctcaaagacgagctatgcttttggaacgccgcaaggctctcaaagaaaaatctagtattcgcagagaaacgctggaggacgcttacaaactacaacagtttgaaagagattgtgacgaaaccaaagggtggattaacgaaaaacttaaattcgcaaccgacgagagttatttggaccctactaatttgggaggcaaagtacagaaacatcaaaatttcgaacaagaactcaatgccaacaaatcaagaatggaagatattacatcaactgggcaagaactcatcgaggctgaccattatgctgcacctcgtattcaatcaagaatggaagagatcgtgaacctttgggagactttggttcaatcaacagataaaaagaattcaaagcttcaagaagccagtcaacagcagcaattcaacagaaccatcgaagatatcgagttgtggctatctgagattgaaggtcagcttatgtcagaagattatggcaaagatctgacgtctgtgcaaaatttacagaagaaacacggtttgttggagggagatgtggcatcacatcaagatagaatcgaaagtatcacttctgctgctaaccagtttgtagaaagaggacactttgatgctgacaacatcgctcacaaacagaaggttctgaccgatagatatgcagctcttcaaacaccgatggcagttagaaagcaaaggttgttggattcacatcaagttcaacagttgtttagagacattgaggatgaagaagcttggattagagaaaaggaacccgttgctgcaagcacaaatagaggtcgcgatttgattggagtacaaaacttgatcaaaaaacaccaggcagtattggccgaaattaacaaccacgaaggtcgtataagtgctgtcattgacgctggtaagcagatgatggaagatgaacactttgctagtgacgaaatcagaaatagagtaaatgctcttaatgatcactgggactctcttaaggaaaaatcaacccaacgcaaacaagaccttgaagattccctacaagcccaccaatattacgctgatgctaacgaggctgaatcttggatgagagaaaaggagccgattgtcagtaacactgattacggaaaggacgaagattcttccgaagctcttttgaagaaacatgaggctttgatgagcgatttggctgcttttggaaacacaatcgatggcttaaaagaacaggctcgtagctgcaggcaacaagagccaccagtagttgatgtaactggaagagaaactgttcaagctttgtatgattacacagaaaaatctgccagagaagtttcgatgaagaaaggcgatttgcttcacctgttgaattcaaataacaaggattggtggaaagtcgaaatccacgatcgtcaagggttcgttccggctgcatacgtaaagaaagtcgatgctggcttgacagcttcgcaacaaaatcttttggatagcaactcgatctccgccagacagaaccagatcaaccaacaatatgacaggcttctacagttggccaacgaacgtcgcaccaaactcgacgaaacagtcaaagcctatgtccttgttagagaagcagctgaattggccggatggattaaagataaagaaatgcatgcccaagtcgaagatgttggagaagacctagaacaagttgaagttatgcagaagaaattcgatgatttccaaacagatttgaaagcaaacgaagttagattggcagaaatgaatgaaatagccatgcagcttgtctcgcttgatcagaccgaagctgctatgaagattcgaacccaaatagacgatttgaataccaagtggacagacttgcaaaagttgacatctgaaagagccaaccaattgggatcagctcacgaggtccaaagattccacagggatgttgatgaaaccaaagattggatcactgaaaaagatgaggctttgaataacgacgatcttggtaaagatttgagaagtgtacaaaccttgcaaagaaaacatgaaggattggaaagagatctagctgccttaggcgacaagatcaaacaattggacgacaccgccaaccgtctggtaaattcccacccggaaagcgccgaacaaacgagacttaaacaagaggaaatcaccgaactatggacccaattgaccgcgaaagcgaacagccgcaaggagaaactactggactcctacgatctccaacggttcctcaacgaccatcgcgatctgttggcttggatcagctctatgcttggattggtcagttccgaagagttggccaacgacgttactggcgcagaagctttgatcgaacgccaccaggaacatcgcactgaaatagacgcacgcgcaggaaccttccatgcactcgaacaattcggtcaacagctgcttaactcgaatcactatgcaagccccgaaatacaagataaactcgaaaaactcaataaaggtcgtgctgacttggaacgagcttggatcgacagacgcctacagttggaccaaaacttagaactaaatcttttctacagagattgcgaacaggctgaaaactggatgtctgacagagaagccttcttggcttctgacgatgtagatagcaacggagacaatgtcgaagcattgatcaagaaacacgaagatttcgacaaagctattaatgcccatgaggaaaagatcgctgccttgcagatgttggctgatcagttgattgaaagggaacattatgccgccaaaccaattgatgacaaacgtgctcaagttttggatagatggcgtcatctcaaagacgctcttatcgaaaaacgttcaaaattgggcgaaagtcaaaccttgcagcaattctcaagagacgcagacgaaattgagaactggatagcagagaaacttcagttggccactgaagagagctacaaagaccccgccaacattcaatccaaacaccaaaagcaccaagcattcgaagctgaattggcggctaacgcagatagaattcaagctgtgctggccaacggtgccaatttgatcaacaagcatcaatgtgccggatcggaagaagctgttcaaaaacgtctcgagtccattgccgatcaatgggagttcttgacacagaaaactacagagaagtcgcttaaacttaaggaagccaataaacaaagaacatttattgctgcagttaaagatctggacttctggttgggtgaagtcgagagcttgttgaccagcgaagatgctggtaaagatttgacttctgttcaaaatttgatcaagaaacaccagttagtggaagctgatattcagcatcatgatgacaggattaaagatatgaacgaccaggcagattccttggttaagagcggacagttcgattcaacatctattttagaaaaacgagattccatcaattcaaggtacgaaagaatcaagaatttggctgcccaccgacaagccaggctcaacgaagctaacactctacatcagttcttcagagatatcgctgatgaagaatcttggatcaaggaaaagaaacttttggtgggttcagacgactatggccgcgacttgaccggtgtccagaacttgaagaagaaacacaaacgtctagaagccgaactcgcttctcacgaacccgctatccaagctgttcaagaagccggcgaaaagctcatggacgtctctaatctgggagtccccgaaatcgaacaacgtctcaaggccttaaaccaagcttgggctgaattgaaacaattggctgctaccagaggacagaagttggatgaatctttgacttatcaacagttcttggctaaggttgaggaagaagaggcctggattagcgagaaacaacagttgttgggcgtcgaggattatggtgacactatggctgctgtacaaggattgcttaagaaacatgacgcgttcgaaactgacttccaggcccatagagatcgctgcaaggacatcagcgacgatggtcaacgactcgtttccgaaggcaaccatcattctgacagtattaaccaacgttgccaacaattgcaaaccaaactggatcatttggcggctttagctggtagacgcaaggctaagctagtagacaattcggcctatttgcaattcatgtggaaggctgatgtagttgaaagctggatcgccgataaggagagccacgtcaagagcgaagagtttggaagggatttatcttctgttcagaccttgttgactaaacaggagacctttgacgctggtcttactgcatttgaacatgaaggtattcaaaacataactgcacttaaagatcaactaatttcttccaaccacgaccaaactcaagctattgtccaaagacatcaagctgttatttccagatggcaaaaacttctaaacgactctgacgcacgcaaacaacgtctgctgcgcatgcaagaacaattcaaagaaatcgaagagctcttcctcatgtttgccaaacgcgcgtccgcgttcaactcctggttcgagaatgccgaagaagatttaactgatcccgtacgttgtaactcaatcgaagaaattcgcgcgttgaaagaagcccattcccaattccaagcttctttgtcaagtgcgcaagccgactttgacgggttagccgcgctggatcaacagatcaagatgttcaatgttggacccaacccttacacctggttcaatatggaagcgttggaagacacctggaggaatttacagaagattatagccgagagggatgttgagttgaacaaggaggcgcagagacaagaggagaacgataagcttagaaaggagttcgctaagcatgctaatgctttccaccagtggttgacggagacacgtacctccatgatggagggctcaggttctctggaacagcaactggaagcgacgaaacgtaaggcagcagaagtacgtgctcgtagatcagatctgaaaaagatagaggacctaggagccattctcgaggaacatctcatcttggacaacagatacaccgaacattctactgtcggtttggctcagcaatgggatcaactggatcagttgggtatgaggatgcagcacaatttggagcaacagatacaagcgagaaaccagtccggtgtgagcgaggatgccctaaaagagttctccatgatgttcaagcacttcgacaaagaaaaatccggaaaactcaaccatcaagagttcaagagttgtcttcgagctcttggatacgacttacctatggtggaagaaggccaacctgatccagagtttgatgctatactggatgtagtggatccgaatagggatggtcacgtttctctacaggaatacatggcctttatgataagcaaagaaactgagaacgtccagagttccgaggaaatagaaaaggcgttcagggcaataacggcaggagatcgtccatatgtcaccaaagaagaattatatgccaatcttaccaaggaaatggcggactactgcgtggcgaggatgaagccttacgtagagccgaagacagaacggcccatccagggcgctttggactatatcgagttcacacgcacactttttcaaaattagttaggttaggttccgcattagtcgcttactcttgctaaacgttagatagacagtataatattattattgcaataagaaacaaatatttattgaagattatatatttcagattatatatatttattgttccgtatattcttttaacgatttttatgagtgaactgttcttacactatttttatgggctttgtggctttaatattgggacaagatatatttaaaagtgttcattttaatattaatatagttttgtatcttttaattattgtacttgaggtgtttctcaaatatataactttgcttcattaaaaaaaaaaaaaaaaaaaaaaaaaaaaaaaaaaaaaaaaaaaaaaaaaaaaaaaaaaaa

SEQ ID NO: 308 - DNA, 1722 bp, Diabrotica virgifera
gcacgaggccagccgatcagttcctcttccgttcgccacaaactaaggtacgtgccacacagatccagttccaacatgagggaaatcgtacatttgcaagctggacaatgcggaaaccaagtgggagctaagttttgggaagtaatatctgctgagcatggaatcgatcctagcggaatatacataggagatagcgacttgcagttggaacgtatcaatgtatactacaatgaagcgtcagttgcttcttcaacaaatggaggtaaatacgtaccaagagcgatcctgttggatttggaacccggtacgatggacgcagtacgttctggaatgtacggcaaactattcagacctgataacttcgtgttcggccaatccggcgctggaaacaattgggccaaaggtcactacacagaaggtgctgagctagtggacgctgttctagatgtcgtacgaaaagaagcagaaaactgtgactgtctccaaggatttcaactgacacactcgctaggtggtggtactggatctggcatgggtacgttgttgatttcaaagatcagagaggagtatcctgataggatcatgaacacttattcagttatgcctagtccaaaagtatctgacactgttgtggaaccatataatgctaccctatccgttcatcaacttgtagaaaataccgatgaaacctactgtatagataatgaagctctttatgacatttgctttagaacattaaaggtaccaaacccaagctacggcgacttaaaccacttagtttcactgacaatgtccggagtaaccacgtgccttagattcccaggtcaattgaatgctgatcttagaaaactggctgtaaacatggtgcctttcccccgccttcacttcttcatgcctggatttgcccctttgacctccagaggtaatcaacaatacagagcactcactgttccagaattgacccagcaaatgttcgattccaagaacatgatggctgcatgtgatccaaggcacggtagatatctaacagttgctgcagtatttagaggtagaatgtcaatgaaagaagtagacgaacaaatgttagcagtccagaacaaaaacagtagctactttgtggaatggatccctaacaacgtcaagactgccgtgtgcgatattcctccagttggattaaaaatgtcttcaaccttcattggaaatacgaccgccattcaagaacttttcaagcgaatttcagaacagttcgccgctatgtttagaagaaaggctttcttgcattggtacactggcgaaggcatggacgaaatggaattcactgaagctgaatccaacatgaacgatttggtgtctgagtaccaacaatatcaagaagccaccgccgatgatgaatacgaagccgaagaggaacctgctgcggatgacttcaattgttgacgaattttctgagtccctactcaacaatgtttttagaaacttaaaaaatttaatagaaaaagcaaggaaattatttatttatttggtctacgtccgtttagatattgattgttagtggaaaatgcggtgatttggagaatttgtccaagttctgttgtgtaggtggtaccaatccgcatttgttttagaaattgagaaaaagtattagttaaggtagatactgtcaaatcttcagaaataattagacaatttaaacggactgtatactacattttttaacaacct

SEQ ID NO: 309 - DNA, 7898 bp, Diabrotica virgifera
cgtttcggtaatcgtagggaaaaggaaaacccgtgttttatcaaaaaaatgtacacaactcaaatctaaagtgattttctaagtgagtgttagttgtaaaattatgtgcgttgattagtggtagacatgtttcggtgcatacccatttttaaaggctgtaacaggcaagtggaaactgttgataagagacattgttctttaataaatgttcccgaggagatattaaggtattctaggagcctagaagagctacttttagactccaataggatacaagttcttccgaagaacttctttagacttcatagactccgcaaactcggtctaagcgataatgaaatcaacaacttgccgccagatattcaaaatttcgaacatctcgtggaattggacgtctccagaaatgatatccctgacatccccgaaagcatcggccagctgcgttccctccgagtcgcagacttcagttccaatcccatacctcgtcttccgccgccctcaatccacctcaagtcactcagcgtgttgggcctcaacgatatgtcgctcacgtcgctgcctcaggatttcggccaacttacgtccctcacgtcgctcgaacttagagaaaatctgctcaaggaattgcccgcttctctgtcgaagttgaccaacctcgaaagacttgatttaggcgataatgaaattgaagaattgccatcacacataggaaaactgccagcacttcaagaactatggttagaccacaatcaattacaaagtctccctccagaaataggccaactgagcaacctaacatgcctagatctatccgaaaatcgcctagagtatctaccagaagatattgcgggcttggaaagcctaactgacttacatttatcccaaaatgtattagaaactctgcccgacggcataggaaagttagaaaaacttaccatcttgaaggtagaccaaaatagactaacatctttaaattctaacgtaggctattgccacaatctacaagaactgatcctcacagagaactttttaagcgaattacccgtagaagttggaaaattaatcaaactgacgaacttgaacgtcgataggaatagtcttactttggtacccgaagacataggcaatctctgcgagctaggcgtgttgagtttgagagataacagacttactatgttgccggacactctcggcaactgccgaagactccacgtgttggacgtttctggaaacagactgccttatctaccctatacgcttctacagttgagcctgaaggctgtttggctgagcgaaaaccaggcacaatctctactcaccttccaaactgacactgacccggatacgggtaagaccgtactgacgtgtttcctgttgccacaacaagaataccaacctacgatagatggcgctgcgaccgaggacgaagacgacgacgactggcgggaacacgaagccagccgaacacactccgtcaaattcaccgatccgcaagagaaggacaatcgagagactccatttgtcaggcacaacactcctcatccgaaagagttaaaggctaaggcccataaacttttcggaaaaggtcaaaattcgctagaggaaagcgagcaacattccaacgacaacagtgcaaacacgcccgaggccctcaatctacatgtaaagcaggttcctgaagcgccacagataattgaacctcctacaactcggaccgactctgcagtaggtaatggacaagtgcaggaaaaggagcaaagacaagatcaacaagagaaaaacacgcacgaggaccacgaaacacaacgacgagtcagagtcggcgggaaagcgacaacgtagtcggaccaacgacaaacgaccaacaaaaccacgcgaccgaaaaggcgcgaaaaaacccaccacaacaagaacaaaagaaaaacggagacgacaaccaaaaaaaaaaacgcggcagcgataaccccacacccccccaaaaaaaaaaaacaccaaacacacacgaccagcaacaacaacaacaaaaaagcatcagtcaacaaaaacaacaatacgagtcccaaaaatcaagctggtgattcagatgcagcagtagaactcagagaagaaaaatatgaaatccacattgaacgctcccaaactggattagggctatcgatagcaggcgggcacggctcaactcctttcaagggcgatgacgaaggcatcttcatttccagagtaaccgaaggtggtccggccgatctagcaggattaagagtaggagataaagtcataaccgtcaatagagtcaacgtcgttgacgtcagtcactacgatgcagtagaagtcttgaaagcatcaggtcctgtgttgattctagaagtaacccgagaagttaccaggttggttaagcctccgaacacgatggtagcaactaagcacagtccaacaccttctcttacgaatacgttgaacaaaagcgcaataccccctccattgcctcctcaattggaagaagaggtgcccttacaaaaagtattagtccatacaacattaattagagactcaaaaggtctcggttttagtatagcaggaggcaaaggctcccaaccctttaaggctgacaatgacgccatctacatatcacgcattaccgacggaggagtcgccgatagagacgcgaagctctctgtaggcgataaagtaatatcaataaacggcgtcgacttaacgggggcctcccacgatcaaaccgtaagcatgcttacgggattggaaagattcgtgagactggtggttgagagggaagtgcctctggagaaaaacggcgacgaggctagtccgggacctcagcaaagtccgaggttgtttggattgcccaagccgtatacgggactgtatgctgctaatagttacatggctaaccgacctggttacgcggggtatcgaagatcgatggaacttgataaaaagacttctgaatctccagagccagtaaagcctccaacgccaacccaggtgttccaagaaacgcccaaaacaaacggaatagaccacagctcgacgagagaagtccccaagccagcgccgcgtcgtatcaactctacttccagcgattcgtccacggcaccaatcaatcctacagctcaaaccgcttccagcgccaagccacaaaccaaccacaagaaaacctcttcgaattcctccctcgaggatgacacccaggacgttacgttaagtaaattaggaggatccttaggtttcagtattataggaggtacagatcattccagtattccattcggatccaaggaaccgggaattttcatctcacatttggttcctggtggtatagctgctaaaagtggtaaactcaaagttggtgacagaattttaaaagtcaatggcacagacgtcactcatgctacccatcaagaagctgttatggagcttctaagacctggagatcaaatttcgcttacaattaggcacgatccattgcccgaaggatatcaggaattgtttattgaaaaaacagataacgaaaaacttggcatgcacataaagggcggtcttcagggtcagcgaggtaatcctctggacagatcggacgaaggtattttcgtatcgaaaatcaactctgtgggggcagcaaggcgagatggaagactcaaagctggcatgagattattagaagttaatggaaaatcattattaggtgcaactcatcaggaagctgttaatgctttaagagcttgcggaaacatgattcacatggtagtttgcaaaggatatgataaaggtgatatagacagagcagtccatgagggcagattgacaagaggagggtccgttagcagtcgttcgcagagcgttagctctttagacgtaccagaagacgacctacaggacttgaaagtaaaatctgaattgcttcagttggaaaaggatgaagttgagaagcgattacagccgatccatcaagaagaagaggaattttctttagtagaagcaaaaccaccttctcctgcggataaggttttagacgtggtaagagcagtagagactctagcacacggtccgatggaaaattcagttcctccaaagtctcctaattcggaactaaaaactactacgatagttatgagcaaacatacgctagcacctcaacctaccactgacgagctaatgcatgtctctacgctaccgaaaacgacacagcctaaagtggatgtggaaacagaaagcaaaagtcactctattgacaatgaacagcatgcttccgtcactaaagatactgataacgattctttacaaaacgtgatcccacctccttccatctactctgaatgtgaacctaacaataatgtatctaatatgtactttaacaatcaacatgtacctaccaatgtaacatactcgatacctcaaccggtagttactagtgactttaattccaacacgttttcgttcaacgttccacctaatgagaatcagttccatattaacgtctacaacactatacctcagctacaaccacaagcatttaaatatgattatgttcctaattttactgatataccaatcgttccttctcctgattctagtcttacatatatgcttgaagattctcaaattatcaaagttccaccgccccctcctatggacttcgacgattattccataaaatcggattcacctcctcctttaccatccacttcccctccacccctgccaaaatctccactacctacagaagacgacgacattgtatccacaaccgaaaaagttctggaaacttcagtgcaagtctcaacaactacaaccataaatccaactaataaacatcatgtaactattacagaagaagaagaagttacagagtatacaaaaccacctataggagcgctgaagaaaattgtagccagcttaagagacgacatcgtagctcataccactgttccaggagatgtagaggtttgtgttaccgctccaacagtagtgcaaacacaagtcagtagaacagttgatttgtcttctccaacaatagaaaatactgataaacaaatcagtcaactttgtacaaatatagacgatgctttgcaggcagctactaatatagatcgaacaatagaacaaactaacagaatgtttgtaactagtttgaccgaaacagatcggattatttcttctaaaaaacatgtatcatatctaactgatgactcagacaacatcgaagtatctattatcccttcagaccaaggaatgttaaggaaaccaaaagatgatcaattacagccaaacaacgaatcagaatcgatcaatagaaaatttgtaagaagttgggtagaaacggaagaaaagacgtcttcacttccagcaagaaaacttgtcactagcttgataatcgatacaccctcaaacgaaaagcaacaagtgcaatattcccaaatcatagcacctacaccattcaaaataacaaaacaaatttcccaaacatctgaacctcgttcacctaccactccaaccagacgaattgctcgacctcaagtccctcccccaccagtacccatcgctaaactagcttcacctccccaaattcaagccaagaaaattccacccccagtacctgccaagatttctaaattgaaccctgctcgcagtgaaaatgatttattagaccctgttggttctgtcaaaaaaagcaaccagcccgctagacctgtttcttttgtattttctgataaaaaggatttgggattcgttagcggaaatttagggaagtatggtactgtggcaaagcctccacaatctccccaacacaatgctcccaagcagtcggtgagcgatagaaagaaatttttcgaatcggcgatggaagagagccaaaaaccttctaaaccagaaaaagtctttagctatcttagtgcggacgaattagagaagttaaaagcagaagaagagagaaaaattgcaacactttcagcttccgatattaattccttacattctttacacgaattggatcattctgatggagaatcagctgaatcacaacgttcaaggccttcgagtactatcggtatagtacgtacagcaaaggcagaacgacgtctgagagatcaacttcgagaagaaggacttttgaccgacgaagacgatcctcccctctcaccagccgaagaacgcgccctccgagccgaaaagagagctgcctggagagctgccagactcaagtccctcgaacacgatgccatgcaagcgcagatggtcatcaagagtatgacggacattgttagatccggggaagtacccatgcctataacgacagaaattagtgatacagacgggcttccacaaacaaatgagttacgtccctcgagtgccgatttccccaagctggccgtgaggacgaaacccggcaacacgaccgttagagagagcgagaaggtattgggagaaacgataacgagaaagacggaggaatacatcgacgaaaacggcgagaaacgagtgagaactgtggagtacgtagagaagctgattgagagagaggtataagaaagcaaaaattgatggcttatgaaatcagcatgactctcttttgtgcaccattctggtggaacaaatccaagaaaaaatcatatcactagaattaacgaaatacgacgacgttctgaagccgcagtcccttaaactagaccaggacgaaaacgatatcgaagaggaagaatcagtatccgaagtatctgaacctcccactcctacgacggatcaggagaaaaccctcgaatccgccgatggagccacgaacaaaagacgaagacggaaaagatccaaaaagggaaaacactagtgaataaaagcgaacatttttaatctcttgtaaaaagtagaatttttttatctgtaagttgagaattggcaacattggaaattttgaaaaatgcactacttactttctattcctacggagtgagtttgatgtatggaacgcatcaattatcttggaatcatcttgtacgatttttatagatttttgtttgtaagcggcttgtaatgcgaccgacattatagtggtatttacattgttgtaggatcttccgattttctggaaatctagggaactttcttattttaaatggtataccctgtatatgttgtgccttttgaagtcattaagaaatactcattatttttcatccaatgctccctatacctaaatgtcataattacggagttattactacatttaaattatctttgccgaagttaatacatttagatgaataagatgatatgaaaatataattggtatttcttaattacttcaaaaggcgaaaaatatacagggtgatctattcgaaataagaaatttcgttaatttccagaaaaacggaagatctggcgacaatgtaaataatcaatataatattggccgcattataagacccttacacacaaaaatcgtgcaagccgtttccgagataattgagccgttccataattaaaactcattttgtatattttaaaaattgccgtgttgtgaactcgtcagtctgtattttctcatgaattgtttcaccagggtggaagggatttttaaatgttaaaattatatttaaaatatatttctaaattatttttattgtacaaaatatttatagatcttaaatatttttattacgatgaatttatcgatgtatgtataaacaactttccaaggctttttttatattgtataatggagactgtgtagccgccatcttctattttattgtttattcattactaactatattatgtttcttgtatgtggaggacggctgcgcagatgttgatatagcgaatgggacaatatattatatacatgtaactaatataatacgaaagtgctttggaaaaaacaattccac

SEQ ID NO: 310 - DNA, 1950 bp, Diabrotica virgifera
gaagaatccatcagacgctaaaaccaaatctagtaaccagtgctgccacccgggggtgggggcatctataaaaacgcaaaaccgccggcgggggggcatttcagatcaacgcatcgaagagagtgttctgtgttttctagtaatagttatttaatacattttataaatcaaaatgagggaaatcgttcacatccaagctggacaatgcggtaaccaaattggagccaaattctgggaaatcatctctgatgaacacggaatcgaccccaccggagcctaccatggagactctgacctccaacttgaaagaatcaatgtctactacaacgaggcctccggcggaaaatacgtaccccgcgccatcctcgtcgacttggaacccggtaccatggattcagtaaggtcgggtcccttcggacaaatcttcagaccagacaacttcgtgtttggacagtctggagctggaaacaactgggccaagggacattacacagaaggtgctgaattagttgattcagtattagatgttgtaaggaaagaagctgaatcatgtgattgtttacaaggattccaactcacacactcacttggaggtggtactggatcaggtatgggtaccctccttatctcaaaaatccgtgaagaatacccagacagaattatgaacacatactcagtagtcccctcacccaaagtatcagataccgtagtagaaccatacaatgccacactttcagtacatcaattggtagaaaacacagatgaaacatactgtattgataatgaagctctctatgacatttgcttcagaactttgaaactcacaacacccacatatggagacttaaaccatttggtatccctcacaatgtccggtgtaaccacctgtcttaggttcccaggtcagttgaatgctgatcttagaaaattggctgtcaacatggttcccttcccccgtctccacttcttcatgcccggattcgctccactcacctcaagaggcagccaacaatacagagcgttgacagttccagagctcacacagcaaatgtttgatgccaagaacatgatggcggcttgtgatcccagacacggaaggtaccttacagtagctgcagtattcagaggtaggatgtcaatgaaagaagttgacgaacagatgctcaacatccagaacaagaacagcagctacttcgtcgaatggatccccaacaacgttaaaacagccgtttgtgatatcccaccaagaggtctcaagatgtctgccactttcatcggcaactcaaccgccatccaagaattgttcaaacgtatctccgaacaatttacagctatgttcaggaggaaagctttcttgcattggtacaccggagaaggtatggatgaaatggaattcacggaagcagaatccaacatgaacgacttggtatcagaataccaacagtaccaagaagccacagctgacgaagatgccgaattcgacgaagaccaggaagccgaagtcgacgagaactaaatttcatacgttaattttggatctgaaatcaaagctttataacttttatatttgtctcctctccttttattttttatttaagcatgttttttgtacagtctctacattcccgtttgtaaatttcgaatacactacttaaattattccaagactgactttttgttgcttgtgtttctggaatttcaggaagtgtttagatatttaacatgttttgcgaactgtttttttatgaataggcattaaaactgctgccattacttataaaaaaaaaaaaaaaaaaaaaaaaaaaacaaataaaccttatacagatagatcagttgctctgaaactaaataattcatacaatcgaaaaaaatgtatgtatagtaattatctcatcatcagagttaagtaaaacgccataattcatgccagctttgaaacaaacctatttg

SEQ ID NO: 311 - DNA, 3244 bp, Diabrotica virgifera
ggggggaggtgactgatgacagcccaggtcagtgcgaaggaaaattcctgctgtggcaaagattaactttttagttaagatatcaattgcagctggactttagttatatttttcggcaaataatttataacatcatcgttatagattaatttttcttttttattcgtactattttggtttttgttcacctaattagatacgatactgttgctggatgcagatgaaacgtggttgaagctggacccagtagagatttttagatattcgtaagctcatttagaatatcatatttaacagaaagattttaaatctctaaaagtcatcgtccataagggcgctaaaattttatatgactttggtaaaccatcaaaagacattattagcaagaagcatagttggggatttagggcccgagcaagcgaggtgtatgacttcgcagcgacgtgagcctacttattataggactataaaattttcatcgaataggcatcgaaaacttcaaccatttagagaaacgtgactggctattataatttcacgaaaaacaccaaagatcattaaaaccaatatcctttctcctacgatcttacaacatagctaacgcactacatccacaatgagtgtcaacgttaacagaggcgtcagcgatgtgttctatcgctacaaaatgccccggcttatggccaaagttgaaggtaaaggtaacggtataaaaacggtaattgtcaacatggccgaggtcgccaaagctctaggccgacctcccacttaccctactaaatacttcggctgtgagttgggtgctcaaactcaattcgactttaaaaatgaacgtttcattgtgaacggttcccatgacgcttctaaactgcaagatcttctagatgggttcatacgcaagtttgttttgtgtcccgaatgcgacaatccagaaaccgatcttctagtttctgtgaagaaaaacacaatatcccagggatgtaaagcgtgcggctaccacggtttgttggaatccaaccataagttgatgaccttcatcttgaagaatccacccaactcgaatccagccagtcaaggatcgtcgctgactgaaggaaaacgatccaagcgcagcaaacgtaatggcgaagcgaatggcgaccaagaaaatgattcgacgctcgattcttctgctatggaaaattcaacagacaataacggtggcagcgatgatgaccaaactgaatgggccgtagatgtatccgaggaagctgtaaggcaaaggatgcaagatctcagtgatggtgccaaaaacatgaccatcagtgacgatcttgaaaaatccgagaaagaacgtatggacatcttgtacaacatggtaaaagtcaaacgcgataccggacttttgggaaacgtgcagactcaaaaagaagtcttgagcgaagctgaacgtttggagattaaaaccaaagctcctctcgttttggccgagttgctttttgatcagaacatcctcgcacaggctaagaaatatcgtatgctcttccttcgtttcactttgaacgagaaaaaagcacagaaatatctaattggtgggctagaacaagtcattgccttacacaaagacaaacttatgagcaaagttcccggtttgctgaaaatcttttacgatatggacattcttggagaggagtgcatcatagaatggtcagaaaaagtgtccaaaaaatacgtagctaaggaagtaagccaagagattcacgacaaagcagaaccgttcataaaatggttgaaggaagccgaatcggaagattccgacaacgatgatgatgaagaagacgatgacgtggagattgaatacaatgacagggcacaaatccaactgaagattactccccaaagcaaacccaaaccggtggctagtaacgatgatgatgggcaagatgatgtggatatcgatgctatctaaacacttctcttattattagttaggccctttgttacgaacttttttattataattatcattatagtagtgtaccattaaacgtaatattccgtatgaaaaaggccatcactctttatattcttcatttttggacgactgaaactcctacgggacaaaaaccgatttgttctttttttaataatcatcacacaggtcacaattttgtaacaatatatttgtttgggggagcaatggctcaaacttacataaaatagagggtgtttcaattttacaatttcaagaatcaagaaagaaagtcaaaacatcgtggatttgctaaattccacctgtacctcacatttcaagcaacacgagacaccaaaaacatgacaggtgtcatctgtcatgttcttggcgctggattgtgagttttatctaacacacatacacacacaagaatcgataagtgttagaaaatattggaacaattaaatacttgcgaaatgacataaagcagggactttatttattaaaatcgatataactgtccaagtagagtaaatatttaacaaaacatttgaaaattccgccatgaagacgttttggaacaccccctataagtaaaagctgtacacggtaaagtttagtaaagacactccatcaacataacctacattctaagaatgacagcgcgatgttgccattactcttagcttgtgtctaaactacacatttatcggtacttgtttatattttgtttaatccgatggtcctaactattataaagggctttagtataattttatatctatctatctatccattatgatttttataaatatgttaatgttggtgatcaggattgcagggtgagtgttgcactaaacagattggaatctattaagcaaactactaataatattaaaaattgctctcattttttcaatatcgtcagttttttgtccgatagatgccattttgttttgtgcgtatcatcctgtacaactattatttttactatttaccatttttgcaatgttaagaatattaaactagcattttcccatattaaaacccgttttcgatgttgatcaaagggaatcattggttacagaaaaaaatgtatttcttggaagtgactgtcgtgaaattcgttcatagttgtcttatctagagtggtatagaattgcatattcgagtcacttatctttaaaagatcttgtgttagatgtttttgcaaaatatggttggacttgataagttgtttatatattacctataaattttactgttttaatgtcaataaaaattactgtc

SEQ ID NO: 312 - DNA, 1197 bp, Diabrotica virgifera
cttaaaattatcagaaaatggccagtaattccaaaaagaaatcagataaaggacccacacctgaggaaatcctaaccggttttcaaaatttgagggccgaacagagggctctatcaggaaaactttcagaatttgagttagacttgaatgaacacaaaatggtaatcgaaacattgaaaaatgtaaatgaagacagaaaatgttttagactgataggtggtatactaacagaaagaaaagtaaaagatgtactaccagtattggtaacgaaccaggagaaacttaaagaatttattgaaaagcttcaagaacaaattaccaagaaaggttcagaaattaatgaatatagggaaaaacacaatattaaatttaggggcttagaacctacaaaacaagacgaacaacctgtagcttcaacaacggaagctagagggaatgttttggtttcttaacaataaagtaattacactttttattgtatatttattttctggactttcttgaagacatattaactctttattaggcctttacaatgtttgtaagatatattaacaagtttttaatgtaaactgttgttatttttggttgaattagaaggcttgttctgttactttcaaatatgaagttttataaattgatatttttcatctaaacaaaataagtaagatgtttgtgtatgcgcagtatttttaccaaaaactgtctttaaattatcaagtaacatactattacattatctattagtggcaaaatcaaaactgtgaaaatacagagtaacctggcaaaaaatgacattttttgtttatttctaatacgtatcttgtatccaaactttatacgctttgtatgtaagtttatacatatagtagacaattcactatttgaaagtaatgaaagtggcaacagctttttgtattctgttaaagcattgtataagaatacctcttcatttaaagatattgttctgatacatctatcagcatcacctttcaagaactatttttgtattttaacagtaaatttgtgttatagtataattgaatcaaatgaatctcttcatagttttctatgtaaggtagttttttgctctatttttaaatccttgcattttacacaatcctatagcacacatttgctgtcttgattactaatgttttatatatttaaagttacagcttattttcaagtgtaaaa

SEQ ID NO: 313 - DNA, 1180 bp, Diabrotica virgifera
  misc_feature (636)..(636): n is a, c, g, or t
  misc_feature (1069)..(1069): n is a, c, g, or t
  misc_feature (1131)..(1132): n is a, c, g, or t
  misc_feature (1162)..(1162): n is a, c, g, or t
  misc_feature (1167)..(1167): n is a, c, g, or t
  misc_feature (1169)..(1169): n is a, c, g, or t
  misc_feature (1174)..(1174): n is a, c, g, or t
  misc_feature (1179)..(1179): n is a, c, g, or t
ggggggagttttgaaggaggccatctttgcaatctctattagaggtcttcagcttgcgctttcattgtctggtgaaaaaccagtatttattacacacacatttcaccaaatggctttaaaacgaattaataaggaattacaagacctcggcagagaccctccagcacaatgttcagcaggtcctgtaggagacgatttatttcattggcaagccacaattatgggaccaccagatagtccataccaaggcggcgtatttttcctaacaatacattttccaacagattaccctttcaaacctccaaaagtggcattcacaacaagaatctatcatcctaacattaatagtaatggtagtatttgccttgatatattacgttctcaatggtctccagctctaactatttctaaagttttgttatcaatctgctcactactgtgtgatccaaacccagatgaccctttagtaccagaaattgctaggatatacaaaaccgatcgggaaaaatacaacgagttggcgcgcgagtggactcgcaaatacgctatgtgatggccaggcccccccgaccctcatttcacatattagaaacaatttatttaataatacataaaaaatcaacaaacacatcggangggatcggccagcctgtcattttcacaaacaaaattctactgtacatttgctttttgaggttttggattccgccacaataccatcatggggcttttatgtaacttttcgattcccaaatgacatgttgtggtgatactagcgtccaaactttggaggaaggaaaaatgtttatataaaataagtactattttttcgtctctacccaagttatctggctgccattgcctcactcgctcccaactgatactatatttaatattagataaattaatacgtaggatttttgtggttcaactaggtgtactataataataaatatatattttttccatactttccatgctctttcaacaattttcattctaagagaaagcaatatgagagttgtactcacataaaatctgtagataatttggaagtaacaagtgtgtnctttaagtacaaactcttttaagatccaaagggaatatccgctaaagggaaaatgttaaagnnttataaaatatacaataagtttttttaaancaagncngcagnttcana

SEQ ID NO: 314 - DNA, 1612 bp, Diabrotica virgifera
aaataagttctaaaaggtatttggctgagaaatgtaccaagataataagaattcaatgacataattttgtttaacaatcagatcagtcaagtccatctgtgtattgggattaaacaaatattaggcttatcctacatattgtagtgtaattttgggttttataaacccagactttttatattggacagtaaatatgacagaaaccataaaatcaaacaataatcaccttatgggacttcccaacacagtggattatgacaataaggtggatgacttgggatggaaagcaaaacttaaaattcccccaaaggatcggagaattcaaacaagtgatgtaactgatacacgtggcaatgaatttgaagaattttgtttaaaaagagaactacttatgggaattttcgaaaaaggctgggagaaaccatcccctatacaggaagcctctatccctatagcactgtctggaaaagatgtacttgctagagcaaaaaatggaacaggtaagactggtgcttacagtattcctgtgttagagcaaatcgaccctaaaaaagactgtattcaagcactaattatagtaccaacgagagaattagcattacaaacttcacaaatatgcatagaactagccaaatacctagaggtacgtgttatggtgacaacaggtggaacaaacttacgagatgacattatgcgtatataccaaaaagtgcaagttatcatagcaactccagggcgtatacttgacttaatggaaaaaggagtagcagttatggaccaatgtaaaattcttgtattagatgaagctgacaaattactgtctcaagattttaagggaatgcttgacactgtgattaaaaatttaccacaagagaggcaaattttactattttctgcaactttccctttgacagttgaacaatttatgagaaagcatttacgagatccgtacgagataaatctcatggaagaacttacattaaaaggtgttacacagtattatgcatttgtccaggaaagacagaaagtgcactgtttaaatactctattttccaagttacaaattaatcaaagtattattttttgcaattctacacaacgagtagaattgctggcgaagaaaataacagaactgggttactcatgttattatatccatgcaaaaatggcacaagcacacagaaacagggtgtttcatgattttaggtctggtttatgccggaatctcgtttgttctgatctgtttacaagaggtatcgatgtacaagctgttaacgtcgtaataaattttgatttcccgaaaatggctgaaacgtatctacatcgtataggtagatctggtagatttggtcacctgggtattgcaataaatttgatcacctatgacgataggttctcccttcaccgtattgaacaagaacttggtactgaaatcaaacccattcctaaagttatcgatcctaaactatacgtaccaaaagtggatgatgaagaaatcgaaacaggaaaataataagtgtggcaaatattaatagtgtgactcgatgactcaaaatcgtgtaaatatttagaggacacaaaagcaaaactgaaaaagtaactttaatttctt

SEQ ID NO: 315 - DNA, 7921 bp, Diabrotica virgifera
aaaccggtccttatagtaaaagaaaaaccgtatttcgttgtaaattgcattatttttccatacgagcgcgaacccgagaattttcttacatcgtagaccgacagtagatgtgatttcctttgtgatcgacacttgttttttctgtgtgagtgcggttttttgttgtttccctagtcatggctgacgcggaaacgaaagatcgttttgatccagaactgaaatttctttgcgtggacaggaatcattacaatgacccggccacccaggcggaatggacgcagaaaaggttagtttgggtgccccacgaatcgcagggcttcgtcgcggccagcatcaaaggagaacggggcgatgaagtcgaagtggagctccaggagaccggcaagaggaccaacgtgcccaaggacgacatccaaaagatgaatccgccgaaattcgacaaggtcgaggacatggccgaactcacctgtctgaacgaagcttgcgttctgcacaacctcaaagaccgatactattctggtctcatttacacctactccggcttgttctgtgtggtcgtgaatccgtacagaaagcttcccatatacacagataaaatcatggagaggtataaaggaatcaagagacatgaagttcctcctcacgtgttcgccattacagacactgcctatcgatctatgctacaagaacgagaagaccagtctattctctgtacgggagaatcaggtgcaggtaaaacagagaacacaaagaaggtaatccaatatttggcctacgtagcggcctctaaatcacccaaaggagcaggagcgcagaaagatcttatcggtggcctagagcagcaattgcttcaagcgaatccaattttagaagccttcggtaacgccaaaactatcaagaatgacaactcttcgcgtttcggaaaattcatcaggatcaatttcgatgcctctggtttcattgctggagccaacatagaaacctacctattagaaaaatcccgtgccattagacaagcgaaacaggagagaaccttccatattttctaccaacttctttcaggagcttccgatgcccagagaaaggaatttattttggaagacccacgatcgtacggctttctccgagaagacaatcatatcgttccaggagtggatgattcactcgaattcaatgaaactgtcaagagtatgaatatcatgggaatgactagcgaagacttcagtgccattttcagagtcgtatcagcggtgatgttatttagcaaaatggagttcaaacaagaccgcagttctgatcaagccactcttccagataacactgttgctcagaagatcgcccatttgctaggattgtctgttacggacatgaccagggcattcttgaaaccgagaatcaaagttggcagagatttcgtcaccaagagccaaaccaaagagcaagttgagtttgctgtagaagctgtttccaaggcgtgttacgaacgtatgttcaagtggttggttacccgcatcaacagatctctaggaagaacaaagaggcaaggagctagcttcatcggtattctcgatattgcaggttttgaaattttcgaactcaattctttcgaacaattatgcatcaactacaccaacgagaagctccagcaacttttcaatcacactatgttcattttagaacaggaagaatatcaaagagaaggcattgaatggaaatttattgattttggcttagatttacaacctaccattgacttgattgacaaaccaatgggtatcatggctctgttagatgaagaatgtttattccctaaagctaccgacaaaacatttgttgacaagctagttgcatctcattctgcgcatcctaaattcaaaaagagtgacttccgtggcgttgctgacttttccataattcattacgcaggaaaagtagattattgtgccaatcaatggctgatgaagaacatggatccacaaaacgaaaatgtggtatctttgttacaaacgtctcaagatccattcgttgtacacatctggaaagatgctgagaccataggaagagctaaaggaatgtttagaactgtttcttacttatacaaagaacaactggccaacttgatggttaccttacgcaatactaaccccaactttgttcggtgtattattccaaaccacgataagaaggctggaaaaatcgatgctccattagttctggaccaattgagatgtaacggtgttttggaaggaattcgtatttgcaggcaaggttttccaaacagaataccattccaagaattcaggcaacggtatgaactacttactccaaatgttattaacaaaggcttcatggacggtaagaaggcttgcgaggctatgattaagtcactcgaattagacaaaaacctatatagagtaggacagtcgaaaatattcttcagagctggagtcctagctcatctcgaagaagaaagagattacaaaatcaccgatcttatcgttaacttccaagctttctgtagaggtttcttgtctagaagaaactaccaaaagagggtacaacaacttaatgctattcgcatcattcaaagaaactgttctgcttacttaaaacttagaaactggcagtggtggagactatacacgaaagttaaacctcttcttgaggtcactaaacaggaagaaaaactcatgcaaaaagaagacgaacttaaacaggtcaaagataaattagaacatcatgctaaaacagcacaggaattcgagaagaagtatcagcaagcccaagaagaaaaggtcattcttcaagaacagctccaagctgaagttgagctgtgtgccgaagccgaagaaatgagggcaagattaacagcccgcaaacaagaattagaagaaattttacacgatcttgaagctcgaattgaagaagaagaagagcgagctactagtttgaataatgataaaaagaaattacagctgactattcaagacttggaagaacagctagaagaagaagaagctgccagacagaagatacagttggaaaaagttcaatgtgataacaaattaaagaaattagaagaggatttggctctgagcgacgatacaaatcaaaaattaataaaggaaaagaaagtattagaagaaaggagcaatgatttaagccaggcattggccgaggaagaagagaaagctaaacatctgtccaaacttaaagctaaacacgagtctacaattgctgaactagaagaaaggttattaaaagatcaccaacaaagacaagaaactgatagatcaaaaagaaaagtagaaacagaagtgaatgatttgaaggagcaagtcaacgaaaaacgtctacaaattgaagaactccaactacaattgggcaaaagagaggaagaattggctcaagcgatggttaaagttgacgaagaaagtgctcaaaaagctgtatcacaaaaagctttacgagaactagaaagtcaacttaccgagctacaggaagacttagaggctgaaaaagcagccagaagcaaagctgaaaaattgaaacgtgatttgaatgaagaattagaagcactgaaaaacgaacttttggattctttagatacaacggctgctcaacaagagctcagatcgaagagagaacaagaattggcaggactgaagaagactttggaagaagaggctcaacagcacgaagtatctgtaactgatatgcgtcacaagcattcacaagagctgggtagcttaaatgaacagttagagaacctgaagaaactaaaagccaacttggagaagaccaaacagagccttgaagccgaaaatgcagatcttacaagcgagctgagaaatgttggagcgagcagacaagaaggtgaaagacgtcgtaaacaagctgagggtcaattagcggaactttccgcaaaactaacagaagtagaaagatctaaggtcgaattacaagagaagacaatcaaattacagcaagaattagaaaacgtcgcccaacaacttgaaggagctgagttaaaggcatctgctgctgttaagagtcaaacaacgatagaatcacaattcagtgaagcacaggctgctcttgaggaagaaaccaagcaaaaactggctctaagttctaaactgcgacaactagagtcagaaaaagaagctcttcaagaacagatggaggaagaagaggaggctaagagaaacatagaaaaacaggttgctgtattgagtgttcaactggccgaagccaagaaaaaggcagaagacgaagccgaacaggccgccatactcgaagaaagcaagaagaaattggccaaagaccttgaagctctccagagtaaagtcgaagagttgacaacaataaacgataaactggaaagaagtaaaaagaagattgctgctgaattagaagacgccaatatcgatctagaaactcaaagacagaaagtatctgaattagaaaagaaacagaaaaatttcgataaagtgttggcagaagagaaagctgttagtgaacaattggctacagaaaaggacattgttgaaagagaagcacgagacaaggaaaccttagtactctccttgaaacgggaactggacgactctaacgttaaaatcgaagagctagaaagaattcgcagacagctacaaggcgaactcgatgaacttgtcaacaaccaaggaacggctgacaaaaatgtacatgaattggaaaaggccaagagatcgctcgaaagtcaattggccgaacttaaagctcagaatgaagagcttgaagatgaactacagttgactgaagacgccaaacttcgattagaggtcaacatgcaggcacttagagcacagttcgaacgagacatacaagctaaagaagagcaggctgaagaaaaacgccggggcattgtcaaacagctcagagaccttgaagccgaactagacgaagagagaaaacaaagaacagcagctgttagttcaagaaagaagctcgagggcgatattaaagagttagagggacagatcgaacttcactgtaaggtaaaggaagatgctctcaagcaattgaagaagtcacaacaacagtgcaaagaagctatcagggatgccgaagaatgcagagctgccagagatgagtatgcagcggcaagtaaagaggctgaaaggaaagtcaagactttggaagcggaagtacttcaattaacggacgatctcacgaattccgataaactcagaagggcagccgaggccgagagggacgaattactggaagaaattagcaatagcaataataagggtacactacttatcgatgaaaaacgcagattagaagcaagaatagcaacgttagaggaagaactcgaagaggaacaaagtactaacgaaattctacaagatagaactaggaaagctcaattgaatattgaacagttaactgctgaacttactagtgaaagatcaacggcgcaaaaacaggaatcccaaagagttttactcgagaggcagaacaaggagctcaaggctaaactggccgaactcgaaacggctcaacgaaccaagactaaggcaaccattgctgcgttggagagtaaaattgccaatcttgaagaacaacttgaggttgaagcgaaagagcgcctggcccaacaaaaaaccaatagaaaactggacaagaaaacaaaggaattggttatgcagctggaagacgaacgacgacatgcagaccaatacaaagagcaggtagaaaagggcaacgcccgagtcaaggcattaaagcggcagttagacgaagccgaagaagaagttacgagagaaaaagcacagaaacgaaaggcgcaaagggaatgcgaagatatgcttgagtcacacgagtctatgaccagggaaattaataaccttaagagcaaactgaggcgaggcactatgggcatttcatcgtcacgactgagctccacgaaacggggctccatccagaccagtggaaacggttccggtgacgattccaccacgcaggacgaggccatggatggggatgatgcccccaactaaattatttatattaaaatattgcccatttaatttttatccattaataacaacagataattagataggagtggaaataaacatttcgatgagtattaaggttagagtgacaaaatgctgaggtacacgtcatatgtcatacttcgtgtacatatacttcttaccaaactagtattgttctttattaagaccaataatatagaattattacactctatgcaattttcagattgtattgtataagaccaaagcagttttctgatttaaatgcttgcaataattgcttttctttcgtaaaatgacccatacatttatgtatactgtaaattctttatttctggatgcttttgtgacactaataatgtaacatattactgccgtgtgaattttcaatccatatggagcataattgcagagaaaccattcacttatatgtgcattcttaccttaacactactctcaacacatatttggccaaaaaattttcatttctatctaaaatcgacgtattataaaatatcattcacctagcgaaaaagtttgcttctttgtaaatacatttatgtttttctagtacttagcaagatatttataaactttcagttggatcaagacgtattttcagttgatagtatcttaaagctggtaaaaaaattattatctggctaaaaacttgttctaaaacgtaattttttcgtacttaaaaagaatttacttcaaaggtttgatgtacatatgtagtacatatatcaaaaataggtatactgatagtgggtgtgttatatatccttgaggatacttctatttatagttctgatgattaatagcttgtttgattggtgaaaaatgaaatttaatgctaatttacaagtttctactataatactaaaacatcgtaactattgcagaatataattatactacaatcacaatagagatacactggaaataaccaaaccacgttgaatgttcgaggagcactcccaaatcataatttataatgtatatacatacattgtaaatcccaaatcatgatttataatgtatatacattgtaaatcatgattcgggagtgctcctcgtaacattcaacgtgttttggtttgtttatttctggtgtatctttattgtgattttagtataactattggtttattcggtattaccatgattcgattatatttctttcggattgttggcatttaggaaacgtaagaatattctgattacttttttcatgtttcgtcatcctaattatttattcccctttattcgccaattattttatgtaattatatattctagttactgtaatcagttacagtttttatttactgaagtcttgataaaccttcgataaaacgtggattataattgcttcccagcatcaagccagtcgtgaaataaagccatcttgatccaactttacttacagaaaattggccagaagcatttatttactataaggggcctaccatttaatggatttattggtaaagctggttctttcaatctaaaacgaatgggctagcgtacattatttttttacatattgaatttttatgttttaagatttttatttatataaacttcatcttgatacttattttgatttaattatctacgtactttttagtctgatgacgagtatttttcttaattgggtaaagttatctttatcgcgtaccaataccaattattcttttaatatatttcatctttacatacttcgaaagtatagtcaatgctaatgtaataatatataatgaaaaatagtatagacattaacattttgatacacaagtatatttgtagagtatatattttgtaaagacatctatattttagtcgaaacatgattttgatatgcatgt

SEQ ID NO: 316 - DNA, 415 bp, Diabrotica virgifera
ggagttgctgcaaacagaaacgaactatgtagacatcttacatacgatagtaacgatgtttaaaaaacatttggaagaaatgccggaacaagaagccctactcaacaacacagagttaaatctcatattcggaaaactgcctttcatctacgaaacccacataaagatgttagatgaaatacgatggaccgccgcgcattggagcgaagatctatctatcggcaacataatcgtgaaatactcctcggaactgcagagggcctaccctcctttcataaactatttcgaagaaatgaaggaagtgttgtgtcagtgcgatcaaaataaacctaggtttcacgcttttctgaaggacgtgtcagactagagcggagtgcgggagacagagtttgcaggagttgatgattaggcctgt

SEQ ID NO: 317 - DNA, 5308 bp, Diabrotica virgifera
cttaaattgtggaatagaactggaaaaacttggagtatttcagaaatataattgtaaaatactaggtactcccattcaagcaattatagatacggaggatcgtaagatatttagcgaaagaatagctgaaataggagaacaagtagctccaagtatggccgctcattctgttcaagaagctttagaagccgcagatattttaggctatccagtgatggcgagagctgctttttctcttggaggtctaggttcaggttttgctaacaataaagatgaattaaaaactttagctttgcaggctctagcccattctagccagctaattatcgataaatcgttgaaaggatggaaagaagtggaatatgaagttgtaagggatgcctttgacaattgtataacggtttgtaatatggaaaacgtagatcctttgggaatacacacaggagagtctatagtagtggcacctagtcagacactctccaataaagaatataacatgcttaggtccacagctattaaagtaataagacatttcggcgtagtaggtgaatgtaacatacagtatgctctgaaccccaattctgaagaattttatattatcgaagtcaatgctagactttcaagaagctctgcgttggctagtaaggctactggctatcctttggcctacgtggcagcgaaactagccttgggagtatctcttcctgacattaataactcagttacaggtgttacaactgcatgcttcgaaccaagtttggattactgtgttgttaaaattcccagatgggatcttcataagtttaccagagtgagcagcaagattggaagttctatgaaaagtgttggagaagtgatgtcgattggtaggaaatttgaagaagcttttcagaaagctttacgtatggttgacgagaacgttaccggttttgatccttatttgaagcctgttaacgatgaagagctcaaagaaccaaccgataagagaatgtttgttttatcagctgctttaaaacaaaactattcgatagaaaaattgtacgaacttacaaaaatagacagatggtttttgcagaaaatgaaaaatataatcgattgtttaacttgcctggagaccttcgaccagtattccttaacccacgagacacttctcagggctaagcagattggattttctgataaacaaatagctgctgctgttaaaagtactgaattagctatccggaagcaacgtgaagaatttcaaattacaccttttgtaaaacaaatagatacagttgcggcagaatggcctgctacaacaaactatctttatgtgacttataatgctgacagccatgatttgcagttcgaagaacaacataccatggtgttgggttcaggagtttatcgtataggaagttctgtagaattcgattcttgtgcagttggctgtctgcgcgaactacgcaggctaaacaagaagactattatgataaattacaatccagaaacagttagtactgattatgatatgtcggatagattatacttcgaagaaatttctttcgaaactgtaatggatatatataatattgaaaatcctactggagttattttatcggtaggaggtcaattacccaataacatagcaatggatctgcatagacagaaagctataattctaggaacgtctccagattctatcgatggagctgaaaatcgttttaagttttcacgtatgttggatagaattggcattatgcaacctcgatggaaagagctaacaaatcttaaatcagcaatagaattttgtgaagaagtgggttatccttgtttagtacgaccatcatacgtacttagtggagctgctatgaatgttgctcattcaaatcaagatcttgaaacttacctcaacgcagcaagtgatgtaagtaaagaacatcctgtcgttatttccaaatttttacttgaaagcaaagaaattgatgtagacgctgtagcttgtgatggtattattctttgtatggctgtgtcagaacacgtagaaaatgccggagtacattcaggagatgccacattagtaacaccacctcaagatattaatgctgaaactctgtccaaaataaaatacatagtaaaatcaatagccgcttcactagacatcagcggtcccttcaatatgcagctgatagccaaagacaatgacctaaaagtgatcgagtgcaacgtaagagtatcaaggtcttttccttttgtatcgaaaactttaaatcacgattttgttgctatggctactagggttatggttggtgaggaagtagaacctgtagatgtactggaaggctgtggtagagttggagtaaaagtaccacaattttcattctcgagattagctggtgctgacttcatgttgggtgtagaaatggcctccacaggagaagttgcctgttttggagagaatcgatatgaagcctacttgaaggccatgatgagcacaggatttagtattccagaaaaatcaattttgttatccattggaacgtttaagcataaaatggaacttctgccaagtattgcttcgttacagaaaatgggttataaactttatgcaagtttagggactgcagatttctatacggaacatggagtagaagtagaatcagtacaatggactttcgactcaatagacgacatcacaagtcaaggtgaactaaaacctacttgcagaatttctagtccaaaaaacaattcgatcttgtcatcaatttgccaatgagaaatggcggtgcaagaagggtgtcctcttttatgacgcatggatacagaactagaagactcgccatagattattccatcccactgataacagatgtaaaatgtgctaaattactagtggaagctctacgtattattggaagagccccttcaatgaagacccacatcgattgtatcagttctcgcaacatagtaaagcttccaggttttatagatatccatgtccacgtgagagaaccaggagccacgtacaaagaagactatgcatcgtgtacagctgctgctctagctggaggcgttactctcatttgtgcaatgcctaacacaaatcccgccattgttgacgaggaatcttttgcgttggttaaaaggttggctaaagaaggcgccagatgtgactatgctttattcgtaggtgcttcttcggacaacacaacagtggtctctgagttagccgcggaagctgcaggattaaaaatgtatcttaatgagacattcaccaccctccgtctaagggaccttgacgtctggtccaaacatctagccaattggccaaaaagagcccctctttgcgttcacgctgagtctcagacgacagcagcaattattcttttagctagtctccaaaatagaccagtccatatatgtcacgttgccagaaaggaggaaatactgctcattaaggcggcgaaggaaaaaggattaaaagttacatgtgaagtgtgtcctcatcatctgtttctttcaactaatgatatagagaaaattggagtaaccaagagtcaggttagaccagttttggtatccccagaagaccagcaggctctttgggataatctcagcattatcgactgttttgccacagatcatgcacctcacacgattgaagaaaagcttagtgagaaagctcccccaggcttcccaggactagaaacaattttaccccttctacttaacgcagtcaatgaaggcaggatcactttagaggacgttattaataagttccacaaaaatcctaaaagaatatttaatttgcccgaacagcataacacgtacgttgaggtagatatggaagaagaatggactattcccgaagctatgagttacagtaaggccaagtggacaccatttgcaggaaaaaaaataaaaggcgctgttcatagagtggttcttcgtggagaagtagcctatgttgagggacaagttttagtgcaaccaggctttggtcagaatgttagagaatgggataaaagattgtataccacttccgtcgacatgagccgaccttcctcaacattggcattggacagacctttatctccatacttattaaacaatagccttgaatatgataatgataagcagactaatgagatattctccagacttctatctggagaaggtaaagtccactttgccaatgaagcacaaactttcgattctaggatattgtctcctatcccaccacgaattagaacggaaagtttctcaaacactgctgacaaaaagtccaaaacagatattgctgcggatcaggcacaaccacatcacatcacccatcatcatccttggtttaacaagcacatcgtaactgtagacacatttacaaaagatgaattaaatgatatcttcaatttggcacaaactttaagggcgtatgtcgttaaagacaaacctttggatcacgttttaagaggcaaaataatggcttctatgttctatgaagtgagcacaagaacgtgttgtagtttcgctgcagccatgcaaagacttggtgggagagtaatatatatggacgaaacaagttcttcggttaaaaaaggggaatcactagaagattctgtggttgttatggcaggatacgctgatgtagtagttttaagacaccccgttcctggatcaatacaaaaagcttcacatcactgcagaaaagctttgataaatgctggtgatggtataggtgagcatccaacccaagctctattggatatttttacgataagagacgaaattggtacagtcaatggacttaccattactttggtgggcgatttgaaaaacggacggaccgttcattctttggcaaggctattgactttatataacgtgcaactaagatatgtcagtccaccaaatttgaaaatgcctcaacatgtaactgcctttgtaaaatcaaaaggtatatcccaagaagaatatagtaaattagaagatattctaccagaaacagatgtcttatatatgactagaatacaacgagagagatttactagtcaagaagaatatgataaggcttgtggtcactttatagtaactccaaaattgatgactagtgccaaaaagaagatgatcgttctccatcctcttcccagagtatttgagataagtccagaattcgacacagatccacgagcggcatattttcgtcaagctgaatgcggtatgtacgtcaggatggcagttctcacaatgcttttgggaaaatgttaagttctgttttaaatgtggtaaattgtacattccatttttataaaaccgaaatgatgataaa

SEQ ID NO: 318 - DNA, 643 bp, Diabrotica virgifera
atttgattataaataaatagaaaaatttattgcagaacagatttaaggataaaattgaatttattttagtctacgaagcttacatactagctttaataaaatatcagaaatatttcagtacccatatttggaatatactaaaaaatggctctagcaatgcaaagaaaggcaaacgtacgtttgccaccagaaatcaatcgaatattatatatcagaaaccttccatacaaaattactgctgaggaaatgtatgatatatttggtaaatatggagcaattagacaaattcgggtaggaaatactccagaaacaagaggcactgcatttgtagtttttgaagatatctttgatgccaagaacgcctgtgaccatctctctggtttcaatgtatgtaatcggtacctagttgtattatactaccaggcaaataaagcatttaagaaaacagatatagataagaaacaagaggagattgataatatgaagagtaaatatggaataaacacataattttaaactgatattgataatttagatttttttacttatttgtatttatcacttaaatttctttctaaacgcccatctaaaagtgttaagtaggtatgttgtattattccaggggcgtcatttgatagggggc

SEQ ID NO: 319 - DNA, 752 bp, Diabrotica virgifera
catcagtactacatcagagaagtagacgccttgtatgtagccggtcaacagtgccctctttacgaagtcccaggaccgaattccaaaagagccaataatttcgttcgagattttctacaggttttcatatatcgtcttttctggaaaagtttaactattccacggaaaataaggatggacgagattaagagggcttttccgtcccattctgagagcagcatcagaaagcgtttgaagttgtgtgctgattttaaaagaactggcatggactccaattggtgggttatcaaaccagaatttcgtttaccgactgaagaagaaatcagagcgatggtgtctcctgaacagtgttgttcttatttcagtatggtggcagctgaacaacgattgaaggacgctggttatggagaaaaattcatcttcacgcccgccgaagacgacgacgaagaaatgcaactgaagatggacgacgaagtcaaagtggcaccttggaatacgacaagggcttacatccaagccatgaagggcaaatgtttgctccagttgactggtcccgctgatcctacaggatgtggagaaggtttcagctacgtgcgagtccccaacaaacctactcaaagcaaggaagaacaggagtcgcagcccaagaggactgttactggtacagatgctgatttgaggagattatctttgaataatgctaaagctttgttgaggaagtttggagttcctgaagaagaaatcaaaaaatt

SEQ ID NO: 320 - DNA, 777 bp, Diabrotica virgifera
tgcagtgaagacgaatacgggggagccactagaagtagtactaaattatcagttagtagcgaacccgctcccgatacaaaccgaatgggtgctttataccacggtacctggcctgtagaaagaaccatgtggaactccgaaccctccagtttaggagtcaaggcggatgctcagaattctagaaagaatatcggaaatcaaatggcaatggaagtaacgagtgtaatgagctttgcatcaagctcaggaggtgcgcctttagatagggttcttggtagccctgacaggaataaatggtcttcccagcagttagaagctaaaatggatgtagttcatagtctcctgtcaatgttaggagggcaagatcacgtagatatgggagagactctcctagctctgagttcctgtcctgaaagttgccttgccatgcgtcagtcaggttgtattccccttctagtacaattggtacaatcagatcgagatggtgagactagaacgaaagctgcacaggctctacataacttagtacattctcaaccagacgagaaattaagaaaacgagaaagtcgtatactcaaactgttggaacattgtagagcttatgttgaagctgtcaaaaataatatggattttcaaccagccgaaaaatcagaagatggtgataagcatcctgtacaaacagtggcccatcttatgaaattgtcattcgatgaaggacatagacaagcaatatgccagttgggtgggatacatacaatagcaacattagttgaggcg

SEQ ID NO: 321 - DNA, 2249 bp, Diabrotica virgifera
tgtgggtacatgcatcacctatcgattttcggtttgcggtaatttaataattttataatttgttcgtttttatcttgatatctaaataacaagatgatgacctcatttcaacaacagcggcttatgatgagtgcttcggcaaaagcacatccgcctactcaaactattagtgctccaccacccatactgccacctcctggtctacccccttcagttctagcacaatctatgcccctaccgcccatgttaccacctagcatgcaagccctcggtatacctcctcctccaatgcctcccatgcccctgaacacagtctctgaccaaatccctcaacctcccatgtcggtggacccggaccctccgttagacgccgaaccagaactttcaccgcaacctgagatggagcctgatcccatgttggaatatgaacctccagcacctggaacagaagaaatccctgagatacccattgacccagcaagactgtgtgagggatacgagtatatctatgatttgattcaaattggagaagtcattacaggtcctggtgcacgcagcagtacaattgcaggaattttaggaggagcgctgcccaaactatcatcggacgatgcagatgcagtcagcaaagcaaagaaatacgctatggaacaaagtattcgaatggttctcatgaaacagactattgcttatcaacaacagcaagaggctggtcagaggaatctaatccagaggcagcaggctctcgctctcatgtgcagagtatacgtcggaagtatcagtttcgagttgaaggaagacaccatccgttcggctttcctcccctttggccccatcaaatcgatcaacatgtcatgggatcccatcacgcagaaacacaaaggtttcgcgtttgtcgaatacgaaatccctgaagccgctcagttggctctggagcagatgaacggtgtcatgatcggtggtagaaacatcaaagttgtgggaagaccgagcaacatgccgcaggcgcagaacgttatagatgagatacaagaagaggccaaacagtataatagaatatacgtggcgtccattcatcctgacttggtagaagaagacattaaaagcgtattcgaagcattcggacccatcatttactgcaaactagctcaaggaagcactggacacaaacacaaaggctacggattcatagaatatgaaacagctcaagccgccaacgaagccattgccagtatgaacttgttcgatctggggggacagtatcttagggtcggtagggcaattactccgcccaatgctttgttaggaccttcttctggatctagcgtattacccacagcagcagcagttgcggctgcagcagcgacagctaaaattcaagctatggacgcagttgctagtaacgccgcagcgctaggattacctacgttaaataaagcaccgacagttcctaacgtagtgacccaaccggtagttatgccagtgataacgcagccagttgtagcaggaccgacgatagtaacgacgacagcaggcattcctgcaatcattcctccacctggtatcgccataccgcaaattacaccaaacaacacgattcagccggcaattgttacgcctttgatcactccaccacagatcgcagcccctacaatggtcacaccgatgccgatggtccaacaaccttctggcagttcagcagaatcgatgaaaaaggtccaggaagctcagttaaaacaacaggaacaactacagaagaaattgctggatcaaagcgaaccacagacgttgcagcaacaagaaaatatgtcgataaagggccaaaacgccaggcattttgtgatgcagaaacttatgaggaaggtggattcgagagttgttattttaaggaatatggttggtcccgaggacgtagacgaaatgttgcaggaggaaatccaagaggaatgtagcaaatttgggtcggttgaaagagtaatcatatataacgaaaaacagtcagaagaagacgatgattccgatgtgatagttaaaatttttgtagaatttacggaaacatatgctgcagaaagagcgagagatgtattaaacggcaggtacttcggaggacgcatggtgcaagcatccctctatgaccaaacgttattcgatcacagtgatttctcgggttagcacgttttagaccaaagactgttttaataagtgaaaattaatattttaaagttttacgttcgtcaaaaatcgtaaaa

SEQ ID NO: 322 - DNA, 2767 bp, Diabrotica virgifera
ctaagccaaaactctttcttacacataaaactttcaaactgttcccatcataagcattagggagatctgcgaagtgtgcaggttatttgtccagcaattatttcggttaaagcaaatcgttaggaatggtaatggaggctcccccatcaccccaaagtgtaggaagagagtttgtgaggcagtactacacactgttaaacaaagcacccacccatcttcacagattctacaaccatcaatcatcattcgttcatggcggattggacccaccaaaccgcgaaaccagccctgtcatcggccaaaagcaaattcatcagaaaattcaacagttgaatttccgggactgtcatgctaaaatcacccaggtcgactctcaggctactcttggcaatggtgtggttgttcaagtgaccggagagctgtccaatgcaggtcagcctatgcgtcgtttcacccagacgtttgtgttggcggctcagtctcccaagaagttctacgtccataatgacatcttccgttaccaagatgagatcatttccgatgaggaatgtgatgatggcgttcattctgaacctgaggaagaagtttccactgggcaaggaattgttgaacaccaaccaacaataactcaggcggctatagctccatactacaatccaaatgcagcccagttgcagcctagtattccggctgtcccaattcaccacaaccagcaacccccaccacatgtaatgaacccaccggtaccaactgtcaatggagctattcatccagatgaaattaacgttatgcaaggacaagttccagctcatgttcccgctcctcaaactcaaggaatcggaactactcttccaactatgcaacaacaaggactcggccaaacacccatcccacaaccaccaatcgaagaacctgagccacccatggaggatttggttgaggaacctttggacaacagctacacagaacaaccagaaattgaacaggaacaagatattggtatcattgaatcaggttatgaaaacgattataaagacgctttcccaacttccaatgaacccaagacctatgcaaacctcttaaaatcaggttctggtctaccttactcttcaccaccgtctcagacatcagctatgccgatgtctcagaatttgattcgtcccgcatcgccaccagtatcgggaggataccaaaactcaggattgcgctctaatcagaacaattcaaataatcgcaatgtttctggtggagggccaaggccaggccagcagcaaaggatgcccaacagacaagattcgggaagaaacagcatgggaggaggaagaaccatggctaatgatgatatgatatttgatgaaagacgaagatcccaaagccaaaactttaacgatgtcaatcagttgttcttgggtaatttgccccacaatgccaccgaggacgagctgcgaaacatctttagtgattacggcaacatcattgacctgagagtccacagtaaaccccccaaatctggaggaccacctggagctcgtgctccacccaattacggattcatcacatatgagacccagcaagctgtggagaattgtttgagagcaaaacccatatactacccaaaagatgataaaaacggcatcgttctcaacgttgaagagaaaaagatgaaaggcccctcttacggaggcggtcgtcccttgggaggtgacaacagagacaatagagataacagagacaaccgagaccgagacaacaggagcggtcgaggcgacaacggcagtcaacgaagaggcatgggaggcggccccgggggcgtaaacaggaacagcagcggcggccccggcggtccacaaggccccaacaacagaacgaacacatacagcaacagaagttcgggtggagggcctcccaaccggggcggacagaatgcctacaaccgccgctagtagtccgccccccctcccccgtcgtgactgagtgactgacattgccgcgagttgctctagtttgtgtgcaagaggagtatactggcgtgaaatagtgagaaaaatatcggagccgtgttacttttgaaataaaaaatataaacgttagtgccaattgtgaacgatgagctgaaaagtttatttactttgagcctcgcccgcgaccattctaaagaagccaatctctcttactagtagttattgtatttattttgtagtctatcccaaactgctggcaaacttaaagcttttctatctttctacaacagttttagaaatatacagggtgttagtaaatgaggtatgaaatttttaagggcttattctacatgaagaagcaatgccggtttgctctataaacatgtgtccgcagatgcttcgtttgcaagatgcggggtgttggaatttttatttcaacgccaaatcatttgttgctctgggaccagttgagctgtgaaaatgaaatttggtgagttttgggaggtagttattgcgcattttttgacatacaattgagaattttgtattcatcattggcgcgcatacgggtggtggtctgaattttttaaagagaaaaatagtgcgccactgagatgtttcgaactaaaattgtttttaaattccacgtttaatttttgataaaaagatctttcttgcctttttttcctatgatgcaccgtttttatgcagaaaaataaacatcttgccccgtatttttcatttctcaatacatcatcaagaactatccaatataataatactaaactggaacaataacagaaaat

SEQ ID NO: 323 - DNA, 560 bp, Diabrotica virgifera
aacttaccgcccaactaaccctcatcttattatcgatcgtagataattttaaacgtaaatatttctgacgaagacgatacaaacattaatcgcacaatgttgaaaatgaacgtttctttaactttcgaagtattgctttacttaaattcctactactttggattattcgccatttgtgagatatgtatgatatccgtaaagtattttagctttattggtttggaccattattctaccgattttggtgtattaataggagtatgtttcatagaaatcttaagagtattactagctagtagagggaatctgacagagagaaaatggccagtcattgtagctattttattaacaattccgtcagtattgggagtagtctatttaatgatatggcaaagtgagatattaagattcgaatatgttatttgtgggatgcaattaggattttgtgtagccgaaattgtaactggaatcatgtgtcttttttcctgctgccaaacgccagaatattattaaaacaattttatatgtatatttttattaataaagaaatattcaaataa

SEQ ID NO: 324 - DNA, 5244 bp, Diabrotica virgifera
aaaaagtccaagaaaagaagccaatacagttcagaagatgaggaaacgagcgacgaaagcgatgaggatagtaggagagctgtgtccagaaggaaggctactacagttagttacaaggaagaaagtgaggatgagaaaacggattccgaggatttgctagaagttgataataatgaaccggtagaacctgtcccggaagaaaaatgtgaaacaatagaaagaattttggcaacgagaagaggaaaaattggagttaccggaaacattactacagtctactatgtagaagaaaatggtgatccgaatgaaggagttgatgaaaaggatttagatagtacagaagatcagtatctaatcaaatggaaagattgggctcatattcacaacacatgggaatcagacaaaagtttacgagaacagaaagtaaaggggatgaaaaaattggaaaattatatcaaaaaagaagtcgaaattcaacagtggcttaaatattctactcctgaggatgtggaatattatgaatgtcaaatggagttatctcaggatcttttgaagagtttcaacgaggtcgagaggataatagcaaagtacaataagcctgatgggggtaaagattattatattaaatggcaaagtcttccatatgctgaatcgacttgggaagattcagttctaattcaacgaaaatggcctgaccaaataaatgaattcgaagctagggagcaatcaagtatgaccccaacgagacactgtaaagtactcaaacatagacccaaattccacgaagtcaagacccagcctgaatatatgatgggcaaagaacagactttgatactgcgtgattaccaaatacatggtctcaactggatgatacattcctggtcaaaagaaaactctgttatattagcagacgagatggggctcggtaaaacgattcagacaatttgctttctatactatctcttcaatactcaccacctccacggaccatttttgtgtgttgtgcccctttctacaatgacgtcgtggcagagggaaatgacacagtgggcacccgacttgaactttgtcacatacttgggagatgttcagtccagagatacgattcgccaatatgaatggtgctttgaagggtcaaaaaggctaaagttcaatgcaattctcacaacgtatgaaattgttttgaaggataaagcatttttaggaagtctcagctgggctgtgttactagtagatgaagctcacaggttgaaaaacgatgattctttgttgtacaaagctttaatggaatttgacactaatcacaggcttcttattactggtactcctttacaaaatagtttaaaagaactttgggcgctgctacattttatcatgcccgctaagtttgaaacatgggacgaattcaaaagagaacacgaaaacaccacaaactccacaaactataccaaactccacaaacaacttgaaccgtttattttaagacgggtaaagaaagatgtagaaaaatctctccccgctaaagtagaacaaattcttagggtagagatgacgtctatccagaaacaatactataagtggatattaacaaaaaattataatgccttgagaagaggagtcaaaggatccacaacaaccttcttaaatattgtgatagaactgaagaaatgttgtaaccattcgtctttgatcaagcccccagatattgaaacacaatacaatcaacacgacgttttgcagcaacttctcagaggttcgggaaaattagtgcttctggataaattgcttatccgtttgcgcaatactggccatagagtactaatcttctcgcagatggtccggatgttggacattcttgccgaatatttgcagcttcgacatttcccgtttcagaggctagatggtggcatcaagggagagctgcgacgtcaagccttagatcatttcaatgctgaagggtctcaagatttttgcttccttctttcaactcgcgcagggggcttgggcattaatttagctactgctgatactgtgataatttttgattcggactggaatcctcaaaacgatcttcaagcgcaggcaagagctcataggatcggtcaaaagaaccaagtcaacatttataggttagttactgctagatctgtagaggaagaaattgtagaaagggcaaaacaaaaaatggtactggatcatcttgtaattcagagaatggacacgacgggaagaaccgttttggacaaaaaggggtcttctaataataatccgtttaacaaagaagatctgacggcgattttgaaatttggagctgaggaattatttaaagatgaagatgacgatgaggaaccaaactgtgatattgacgaaattcttcgacgagctgagaccagagatgaagctccttcattggttggagatgaactactttcggcatttaaagtagcaagtttcgccgcttttgacgaagatgccgagccctcaccagtcaacaatgttgttaacgacgatgaaagtaaagactgggatgaaattattccagaaaaacttcgtatcaaggcagaggaagaggaaaagaacaaggaaatggaagatctttatcttcctccgcgaagtcgaaaaactcttcaacagattaatcaatctgaaagtgacggggaagaaggcaaaggtaggaagaaaacgaagaaagatggagatgaatcgggaggttccagtggcgatgatgacactgacgaggaaaaacctaaaaaacgaggaaggccaccagcaaaccccagagaaaagttcaagaacttcactgatgctgagattagaaggtttataaaaagttataagaaatttagtggacccttaaagcgattagaggcagttgcttgtgatgctgaattgcaagaaaaaccattagctgagttacggaaattgggagaacttcttcatgagaggtgcagggcatttatgaatgaacaagctaaagaaaatacagagtctaacactcaagacgaacccaaaggtcgcaaaagaggaccatcgtttaaaattggaggagtgtctgtaaatgccaaaacgatgatggcttgtgaggaagagttagaaccattagatgaagtcattccagctgatccaaatgaacgattacgttgggtttttgatgtaaaaacgaagtcgtctcactttgatgtggactggggtatggaagaggacactaagttattgaaaggaatttatcactatggtcttggctcatgggagcaaataaaattggatccattattaggcattggtgataaaattttccttaataatgaagataaaaagccgcaggctaaacatcttttatcaagagcagaatacttattaaagattatgaaaaagcaattagatctaaagaagggggttcaaaaaccaaaaagacagaggaaaaaagaacaaaaagttcttactaaggaaattattgatgacgatgaaagctcaaatgatgtttcatcattaccaagttccgctccagttacagtatcagtagctccggttgttaaaaaggtaaagaaagaagtgaaaaaagaaaaggaggataaagaagaatcctcgcccgagaaaaaggaaaaaaagaaggataagaaaaaagagaaaaagacgtctggtccaatgcatttctctacaaatgaacctgttgccttaaacgttttgggtgatctagaccctttgatatttaatgaatgtaaagaaaaaatgagaccagtcaaaaaagctttgaaagcgttggacaatcctgacgaatctttgcccgaggcggaacaagtccagcatacacgagactgtttacttcaaattggcgagcagattaacacctgccttttaaaatacaccgatccagagaagatcaaggagtggagaagcaacctgtggtattttgtatcaaagttcacggagtacgatgctaaaaaactgtacaaattatacaagaaagcttgtaagaaaacggacaaaatagagactaaaaaggagaaaaaagcggagaaaagagcagagcatttagaaaaggaaagagaagagactgcatctactagcgctgataaagttaaaaaaattaaaataccaaggacggaaaagaaagacgcaaaagaacacaaaagaaaacatgatagtgatagtgaagaatcgcctaaaaaacatcgttctgaaaagaaagaacgacgggcaaaggagaaaaaaagaagtagagatgaaacgagcgaggatgatcaagaataccgttttaatagacatagaaaacctggaaattataggcatgatcaacacgccccacaggatagatggagtggtggtcaacaagaaaggttttctggtgaccataagaggcaacaagactatcatagaggtgcagggtttcatagagaccgggattatcaacgatatgataaaggctccccagaaaagaataatgattggagacaatatcctcgtggcagagaaataatgcctccaatgcccggagggcaacctatgggaatggggggtggttattatcctccaaattataatcaaggacagggctatgcacctgagcagccctttcctcctagggatcgatttccattgggcgattggcgaccacccgatcgtgggggatatagatacgacagacgccagcaatagttttacttaagttgtagtgccatttcatgtaaactcactataattatctattaatttctattaattgctctgcaatgaaaattgtacctatttttgttgattttattttaagaatgttcttcggcagatatgaatagaaaaggctactaaatacgtggtgcttgctatttatagttataaacacaaatgtgataatgaaacgtagaaaatacaatataatcgagaaaattataaattaatcggttttgcaaaataatgtgttaaaatgcgagctcagatgtcctagttctgaatttattgaaattaatttaatcttatttaattactcaaatatgtggtacacacaagtgggaaagtctgggcgatatgcacaatgttcaaatagttttcagtccagggattctaatttttctgcaataaaatgtgactatctagcgttagtaaacgaatattaattgataataatatagtctttcttctttttgacatattaacggcattttttaaggaagaatcttaaggcatgtagcaactatgttcgcgctcctgcaactgatgcggtggcggtttatatgtagaggagcgcgt

SEQ ID NO: 325 - DNA, 275 bp, Diabrotica virgifera
tgagtaatgcacccaaccaaaatggatcaggtctagagcagcagtttgctggtctggacttgcagagtcgcagctcgaacagcagcggccgttacgtgcccccacacttgcgtaataaacaaagtcaacaacagtcgccatctaccgacaacttcgataaggatcgttacgacaatagagatcgtttcgacaacagggacagagacagagatcgcggagcgccagattcaagagatagaggcggcagccgaggaagcaacagaggcttcggcggt

SEQ ID NO: 326 - DNA, 274 bp, Diabrotica virgifera
tggcagatttttacattagatactacgtaggccacaaaggtaagttcggccacgaattcctcgagtttgagttccgaccggatggcaaactccggtacgctaacaactccaactacaaaaacgatacaatgatcagaaaagaagtgtacgtacaccaatgtgtaatggaagaactcaaaagaatcataatcgactcggaaataatgcaagaagacgactccttgtggcctcctccggaccgtattggaagacaagagttggagatcgtcatcaa

SEQ ID NO: 327 - DNA, 274 bp, Diabrotica virgifera
tgtctaaagaagaagatgtacaggtgatacccgatataatttatgatgttcacacaaagacttattacaagaaaggaaagttttatggaaagggtggatttgcaaaatgttacgagctgacaaactcccagaacaaccaatcctatgcaggcaagatagtttccaaaacgttgatgcaaaagcaaaatcaaaaagaaaagatgacccaagaaatacagattcaccaatcacttcgacacaaaaatgttgtcggcttccataatttttttgatga

SEQ ID NO: 328 - DNA, 274 bp, Diabrotica virgifera
tgcagatcttcgttaaaaccttaacgggtaagaccatcactcttgaggtcgagccctcagatactatcgaaaatgtgaaagctaaaatccaggataaagaaggaattcccccagaccagcaacgtctcatcttcgctggaaaacaactcgaagatggtcgtaccttgtctgactataatattcaaaaagaatcaacccttcacttggtgttgagattgagaggaggtgctaagaaacgtaagaagaagaattactccacccccaagaaaatcaa

SEQ ID NO: 329 - DNA, 270 bp, Diabrotica virgifera
tggcaactggaactactttgcaaaaagccattgagttagtcaccaaagccaccgaagaagacagaaacaagaattatgaagaagcccttcgtctatatgaacatggagtagagtactttctacatgccattaaatatgaagctcagggtgacaaagctaaggagagcattagggccaaatgtgtacagtatctagaaagggcagaaaaaattaaagaatctgtaaggaaagggaagaagaagccagttttagatggaggttcttcaaagg

SEQ ID NO: 330 - DNA, 275 bp, Diabrotica virgifera
tgcagacgatcaagtgtgtggtggttggagatggagccgttggtaaaacttgtttattaattagttatactacaaataaatttccttccgaatatgtcccaacagtcttcgacaactatgcagtgactgttatgataggaggggaaccctacaccttaggtttatttgatactgcaggtcaagaagattatgacagactacgccccttaagctacccacaaacagatgtcttcttagtatgtttttcagttgttagtccgtcctcttttgagaat

SEQ ID NO: 331 - DNA, 275 bp, Diabrotica virgifera
tgacgcagcaactgttacctatcaagttccaagaacatttgcagcttaccaatgttggtatccatgctaccaacatcacgttcgccaatctcaccatggagagcgacaagtacatctgcgtgagagaaaaagttggagagacgtcccaagtagtcatcatagatatggccgatacggccaatcccatcagacgaccaatcaccgccgaaagtgctattatgaatccagcatccaaagtcatcgctcttaaaggtaaagcaggcgtagaaacacaa

SEQ ID NO: 332 - DNA, 275 bp, Diabrotica virgifera
tgccgctgtcgtgtcgattttataaagaaaaataccccgaagtggaagatgtagtcatggtaaatgtaagggccatcgctgaaatgggggcatacgtccatttactagaatacaacaatatagagggcatgatcctgttgtctgaattgtccagaaggcgtattaggtcaattaacaaattgattcgtgtaggaaaaaccgaacccgttgtagttataagggtagacaaggaaaagggatatatagatctttccaaacgtcgtgtaagtgctgaa

SEQ ID NO: 333 - DNA, 275 bp, Diabrotica virgifera
tgctccagggggtagatgtacttgcagatgcagtggcagtgacaatgggtccaaagggtcgtaatgtaattattgaacaatcgtggggatcaccaaaaattaccaaggatggtgttacagtagccaaaggagtagagctcaaagacaaattccagaatattggagctagactagtacaggatgtagcaaataacacaaatgaaaaagctggagatggaacaacaacagccacagtattagccaggtcgattgcaaaggaaggatttgataactta

SEQ ID NO: 334 - DNA, 275 bp, Diabrotica virgifera
tgtcggtcgatcgggaaatacccgcagaggacagtattaaagtagtgtgcagatttcgacccttaaatgactccgaagaaaaggctgggtcgaaattcgtagtcaagtttccccaaggagcagatgaaaattgcatttcgatagcgggcaaagtatatttattcgataaagtttttaaaccaaatgcaacacaagaaaaagtatacaatgaagcagcgaaaagcatcgtcactgatgttctatccggattcaacggcaccatattcgcgtatggg

SEQ ID NO: 335 - DNA, 275 bp, Diabrotica virgifera
tgcggaacaggtcgcgagtgggagaagaaccgaccatcggcaaatacaagctactcaaaaccatcggaaaaggaaactttgccaaagtcaaactggccaaacacgttcccacgggcaaggaggtggccattaagatcatcgacaaaactcagttgacacctggttcactccaaaaactatttagagaagtaagaataatgaaaatgttagaccatccgaatatagtgaaactctttcaagtgatcgaaacggagaaaactttgtacctggttatg

SEQ ID NO: 336 - DNA, 275 bp, Diabrotica virgifera
tgtttgaagcacgtttagttcaaagtgccaccttcaaaaaagtattagacgcaatcaaagatcttctaaatgaagcatccttcgattgttccgaatctgggatccaactccaggctatggataactctcacgtttccttagtctccctaacgctgaaatcagatggattcgacaaatacagatgtgatagaaaccttacaatgggcatgaacttgggaagcatgtcaaagatcttcaaatgctccagtaatgatgacacagtaacaatcaaagct

SEQ ID NO: 337 - DNA, 275 bp, Diabrotica virgifera
tggaagcagttaacctaggttcagccacagtgggactgaaaagtaaaactcatgctgtacttatcgctttgaagagggcttcttcagaactgtctgcctaccagaagaaaattatcaacatagacgatcacattggtatcaccatctcgggacttacagctgatgctaggatccttagtagatatatgcgaaacgaatgcttgaattataagtactctttggatacttatatgccattgaataggcttatcagtattttaggtaacaaaatgcag

SEQ ID NO: 338 - DNA, 213 bp, Diabrotica virgifera
tgggcgatgaaaagaaggccagcgatagcgaacacattaatctcaaagtacttggtcaggataatgcagtggtacaattcaaaatcaaaaaacacaccccattaaaaaaattgatgaccgcctattgtgaacgtgctggtataagcacacaagtagtcagatttagatttgatggcaaccccataaacgacacagatactcctaattctttag

SEQ ID NO: 339 - DNA, 275 bp, Diabrotica virgifera
tggctttaagaacctacggagataaaccaataagttttcagctcgaagaaaatggagactactattgtgttggttccgaggtgggaaactatctacgcctctttcgaggttctctctataagaaatatcctggaatgttcaggagatcaattacaaatgaagaacggaaaaggttaattgaacttggtctaagtcaacatgttctagctagtagcgtatcactactgagagcagctgaagtagatgatatcatcgaagggaatgacgaaaaatat

SEQ ID NO: 340 - DNA, 275 bp, Diabrotica virgifera
tggcatcaggagtaactgtagcagatgcctgcaaaaaggtccatgaagaaatcaaaagggacaaaaaacacagatttgcaattttctacatcaaggatggcaaacagattgatgttgaacacataggagaaagaaatgcagagtatgatgatttcctaactaaactgcaagagggaggtgctaatgaatgtcgttatggacttttcgattttgaatacatgcaccagtgccagggaacctcagagtcaaccaagaaacaaaagttattcctgatg

SEQ ID NO: 341 - DNA, 267 bp, Diabrotica virgifera
tggaagatttaaggctaaaaattgatcaggcctgtaaggttgcagaagatttcacaaaactttattatgatactctggataaacgacggcatttgatagcaagactgtatttggagacgggattattatcatggaatggtaatggtgtaactgggaatgaaaatattttgaaatttatgattgatttaccaccgtcatcttttactatacaaactctagacgcacagcctgttttagattctgcagtaaatggacaactgaccttca

SEQ ID NO: 342 - DNA, 274 bp, Diabrotica virgifera
tggctgtacatacaagtagtatcatcggtatcggaaagcctgattatgtggtcggaggaaaatatcgtctacttcgtaaaatcggtagtggatcttttggtgacatataccttggaataaatattacgaatggagaggaagtagcagtaaaacttgaaccaattagagcaaggcatccacagcttttatatgaaagtaaactatataaaattcttcatggaggcataggaataccacatatcagatattatggacaagaaaaagaatataatgt

SEQ ID NO: 343 - DNA, 275 bp, Diabrotica virgifera
tgtcttcccgcaaaaccgtaagccgccgtggtaccacaaagaaacgtgcccaaagagccacatccaatgtattcgcaatgtttgatcaggctcagattgctgagttcaaagaagccttcaatatgatcgaccagaaccatgatggttttgtagataaagaagatctgcatgatatgcttgcttccttaggtaaaaacccaactgatgactatctagatggcatgatgaatgaagctcctggtcccataaacttcaccatgttcttaactctcttt

SEQ ID NO: 344 - DNA, 273 bp, Diabrotica virgifera
tggacaagagaaaaatgatgcccaaaaggcctaggtttgagccacgcggcccaatttccaacggacccatgcagacgaggcctctcgtagctttgttggacggtcgtgattgttcgatagaaatgccaattttaaaagacgtggccacggtggcgttttgcgacgcgcaaagtaccagcgaaatacacgagaaagtgctcaacgaggcggtgggcgcgctcatgtggcacaccattatcttgactaaggaggacttagaaaaattcaagaccc

SEQ ID NO: 345 - DNA, 273 bp, Diabrotica virgifera
tgcctccgaaaaaaggcggaggacccaaaattatagatggggttgatacaacttctatgaccagagaacaattagaagctttcgcgcagagaataaaagaagaaaatgatagagaaagggaagaaaggaattttttccaaatggaaagggataaaatccgaacattttgggagattacacgaaacgaacttgaagaagctcgagcccaagtacgaaataaagacagagctttagaagaaggtgttgagaagaatgaagaagagttaaaatttt

SEQ ID NO: 346 - DNA, 273 bp, Diabrotica virgifera
tgacaagtatggtgcaaaaaagaaaaactcctcagcacttacaaaatgtaaaagtggtagtgagaattaggcctttacttaaacaagaggaggaacaaaatgtaaaaagtgttgtaacagctcatactcaccgagaattagttctcaaggagaaaaagtatagttttgacagagttttcaaaccaacagctacacaaattgaattgtatttgaacgttattgctcctttgattcacgatgtggttgaaggatataattgtactgtgtttgcat

SEQ ID NO: 347 - DNA, 274 bp, Diabrotica virgifera
tgggtcttttgcatctgcagcaaaatattgatattcccgaaataaccctacaagtacacccgtacgtggcaagcctaatcaaacaatgtgcagatgaaggcagaaaaccaaaagtagctgattttagtgacaaagtagatgattccaactttttgaaccagttgcaacatggtgtaaacaggtggatcaaggaaatccaaaaggttacaaaattggatagagatccagcctccggaacagctttacaagaaatcagcttttggttgaatctaga

SEQ ID NO: 348 - DNA, 220 bp, Diabrotica virgifera
tgaccgaaaaacaaccaaaacaactatctgctgccgaagccgaattatatgacagacaaatacgtttatggggaatagagtctcaagaaaaattacgtgcagctaatgtgcttttgattaacatacgagctcttggatctgaaattgctaagaatattttgttatcaggaatcaactctctgacaatattagatgatggaattgtcacagagaaggaaca

SEQ ID NO: 349 - DNA, 274 bp, Diabrotica virgifera
tgttggatcacgattacaccaccaaagaagtatttaacaaaaacttttttaaagactggagaaaggtaatgacagatgatgaacgtgcccttataactgacctgaaaaagtgcaattttaaaaagatgcatgcctatttcatggatgtagcagagaaaaataggaacagatccaaggaagagaaaaaggctttgaaagagaagaatgaggctatagtcaaagagtatggtacttgtaatattgatgggcacaaggaaaagattggtaactttag

SEQ ID NO: 350 - DNA, 272 bp, Diabrotica virgifera
tggtagatagaacttggttgaggaaacttttcgctgatttcgcagaagctaccgttttgtgggcatatcatcccatatacacgtacgaaccctcttcccttatcggaaacaccactggtgttttccccaatgtgccgtcgcagccaggaatgccctgccagggcgaggacagaagtatttatagaagaggagcacgtcggtggaggaagctttatagggttaatggacacatattccaagctaaaagattcaataggagagcattttgcgcg

SEQ ID NO: 351 - DNA, 275 bp, Diabrotica virgifera
tgagtgtactaggttttagtgacattgttaacggaccgttagctcaatatctgcaactttccgcccaaattggcggagatgtggcagagcattcgaatttggttaaaaatgcatttaacgcccaatacaaattcatagaattggccagtcaatcttccaaacccgcacccaacgatttaaacaactttttggttccaacaagcgatagtattcgacaaatccaagagtttagggaaaaacatcgcacttcccaatattttaaccacttatcagcc

SEQ ID NO: 352 - DNA, 275 bp, Diabrotica virgifera
tgtctaaagtaggatgttcttcaacatcaagccaacaattcgagggcgaagcaccctcctctgtggcccaaaagatgtgggaaatgtctaatgctgtggaagttgtaagttcagtagatgaaatatatcgttacgataaaaaacagcaacaagatatcctagtcgctaaaccatgggaaaaagatccacattttttcaaagatatcaaaatttccgcattagctcttttaaaaatggtcatgcatgcaaggtctggaggaaccctcgaggtaatg

SEQ ID NO: 353 - DNA, 273 bp, Diabrotica virgifera
tggccgcttatataaatcgcacaatatccgtgatgtctggtggtgacggaccacacaatagaccacccgtcacggccgttttgacagaacgaggaaaacgtatcccacttgacaattctcctttgcagatattcgtcaaggcgaagaagaagattaatgatatatttggcgagatcgaggagtatgtcgaggatactgtccagtatatgcatgaaatcgaaaaggatgaaaagatagtgaatagtgaaaaagtaaagaatacagaagagtatg

SEQ ID NO: 354 - DNA, 272 bp, Diabrotica virgifera
tggcttcccaagaataccgagttacagaagtcaacgaactggctgataaattgctacatgacggacacccagagagagaccaaatcatcacaagaaaagaagaattaaataacgcttggcaacgccttaagcaaatgacgttgatgcgtcaagacaaactctatggcgctcatgaaatccagcgctacaacagggatgccgacgaaactgttgcatggatcgccgaaaaggatgttgtgctatcttcagatgattacggtagagatttggca

SEQ ID NO: 355 - DNA, 274 bp, Diabrotica virgifera
tgagggaaatcgtacatttgcaagctggacaatgcggaaaccaagtgggagctaagttttgggaagtaatatctgctgagcatggaatcgatcctagcggaatatacataggagatagcgacttgcagttggaacgtatcaatgtatactacaatgaagcgtcagttgcttcttcaacaaatggaggtaaatacgtaccaagagcgatcctgttggatttggaacccggtacgatggacgcagtacgttctggaatgtacggcaaactattcag

SEQ ID NO: 356 - DNA, 275 bp, Diabrotica virgifera
tggtagcaactaagcacagtccaacaccttctcttacgaatacgttgaacaaaagcgcaataccccctccattgcctcctcaattggaagaagaggtgcccttacaaaaagtattagtccatacaacattaattagagactcaaaaggtctcggttttagtatagcaggaggcaaaggctcccaaccctttaaggctgacaatgacgccatctacatatcacgcattaccgacggaggagtcgccgatagagacgcgaagctctctgtaggcgat

SEQ ID NO: 357 - DNA, 273 bp, Diabrotica virgifera
tgagggaaatcgttcacatccaagctggacaatgcggtaaccaaattggagccaaattctgggaaatcatctctgatgaacacggaatcgaccccaccggagcctaccatggagactctgacctccaacttgaaagaatcaatgtctactacaacgaggcctccggcggaaaatacgtaccccgcgccatcctcgtcgacttggaacccggtaccatggattcagtaaggtcgggtcccttcggacaaatcttcagaccagacaacttcgtgt

SEQ ID NO: 358 - DNA, 267 bp, Diabrotica virgifera
tgggtaaagaaaagattcatattaacatcgttgtcattggacacgtagattctggtaaatctactactactggacatttaatttacaaatgtggtggtatcgacaaacgtaccatcgaaaagttcgaaaaagaagcccaagaaatgggtaaaggttcattcaaatatgcctgggtactcgacaaacttaaggccgagagagaacgtggtattaccattgatattgctttgtggaaattcgaaacagctaaatactatgtaaccatca

SEQ ID NO: 359 - DNA, 268 bp, Diabrotica virgifera
tggccagtaattccaaaaagaaatcagataaaggacccacacctgaggaaatcctaaccggttttcaaaatttgagggccgaacagagggctctatcaggaaaactttcagaatttgagttagacttgaatgaacacaaaatggtaatcgaaacattgaaaaatgtaaatgaagacagaaaatgttttagactgataggtggtatactaacagaaagaaaagtaaaagatgtactaccagtattggtaacgaaccaggagaaacttaa

SEQ ID NO: 360 - DNA, 271 bp, Diabrotica virgifera
tggctttaaaacgaattaataaggaattacaagacctcggcagagaccctccagcacaatgttcagcaggtcctgtaggagacgatttatttcattggcaagccacaattatgggaccaccagatagtccataccaaggcggcgtatttttcctaacaatacattttccaacagattaccctttcaaacctccaaaagtggcattcacaacaagaatctatcatcctaacattaatagtaatggtagtatttgccttgatatattacgttc

SEQ ID NO: 361 - DNA, 272 bp, Diabrotica virgifera
tgacagaaaccataaaatcaaacaataatcaccttatgggacttcccaacacagtggattatgacaataaggtggatgacttgggatggaaagcaaaacttaaaattcccccaaaggatcggagaattcaaacaagtgatgtaactgatacacgtggcaatgaatttgaagaattttgtttaaaaagagaactacttatgggaattttcgaaaaaggctgggagaaaccatcccctatacaggaagcctctatccctatagcactgtctgga

SEQ ID NO: 362 - DNA, 275 bp, Diabrotica virgifera
tggctgacgcggaaacgaaagatcgttttgatccagaactgaaatttctttgcgtggacaggaatcattacaatgacccggccacccaggcggaatggacgcagaaaaggttagtttgggtgccccacgaatcgcagggcttcgtcgcggccagcatcaaaggagaacggggcgatgaagtcgaagtggagctccaggagaccggcaagaggaccaacgtgcccaaggacgacatccaaaagatgaatccgccgaaattcgacaaggtcgaggac

SEQ ID NO: 363 - DNA, 275 bp, Diabrotica virgifera
tgtttaaaaaacatttggaagaaatgccggaacaagaagccctactcaacaacacagagttaaatctcatattcggaaaactgcctttcatctacgaaacccacataaagatgttagatgaaatacgatggaccgccgcgcattggagcgaagatctatctatcggcaacataatcgtgaaatactcctcggaactgcagagggcctaccctcctttcataaactatttcgaagaaatgaaggaagtgttgtgtcagtgcgatcaaaataaacct

SEQ ID NO: 364 - DNA, 275 bp, Diabrotica virgifera
tgacgcatggatacagaactagaagactcgccatagattattccatcccactgataacagatgtaaaatgtgctaaattactagtggaagctctacgtattattggaagagccccttcaatgaagacccacatcgattgtatcagttctcgcaacatagtaaagcttccaggttttatagatatccatgtccacgtgagagaaccaggagccacgtacaaagaagactatgcatcgtgtacagctgctgctctagctggaggcgttactctcatt

SEQ ID NO: 365 - DNA, 275 bp, Diabrotica virgifera
tgatattgatttgtgacagtgacagatgbacgagcttgccggaggaagattatctatttgatgattatctagaccaagttttgtctccatcgggtcgaagggattcaagcgccacccccggaagcgctgccaggcggagaaaacggaagctgttgctatcgtctcttgtacataaccaatctcccgctcttacgaaacgaagatcatcggttagcgatgctgggttgttgtcagtctctgggtcgtttttggattgtacgacgagtcccaataag

SEQ ID NO: 366 - DNA, 275 bp, Diabrotica virgifera
tggacgagattaagagggcttttccgtcccattctgagagcagcatcagaaagcgtttgaagttgtgtgctgattttaaaagaactggcatggactccaattggtgggttatcaaaccagaatttcgtttaccgactgaagaagaaatcagagcgatggtgtctcctgaacagtgttgttcttatttcagtatggtggcagctgaacaacgattgaaggacgctggttatggagaaaaattcatcttcacgcccgccgaagacgacgacgaagaa

SEQ ID NO: 367 - DNA, 275 bp, Diabrotica virgifera
tgggtgctttataccacggtacctggcctgtagaaagaaccatgtggaactccgaaccctccagtttaggagtcaaggcggatgctcagaattctagaaagaatatcggaaatcaaatggcaatggaagtaacgagtgtaatgagctttgcatcaagctcaggaggtgcgcctttagatagggttcttggtagccctgacaggaataaatggtcttcccagcagttagaagctaaaatggatgtagttcatagtctcctgtcaatgttaggaggg

SEQ ID NO: 368 - DNA, 281 bp, Diabrotica virgifera
tgggatttaaagataaccagatcgtttatatatcgataggcatgtcgaggaatatgaagaaacgggagtttatggatgcaccatctttacacccgcctcctcctcgggaatgtttaccaacattacttcttctacagccaaattactttgagcagctattttccttaatgcacacacttagttcaatgaaaattcaaattaaaggagggtgccaattaccacatacaagagcccaagttctcagcagaagagtatgggatattcttagcttattaccaacc

SEQ ID NO: 369 - DNA, 274 bp, Diabrotica virgifera
tggtaatggaggctcccccatcaccccaaagtgtaggaagagagtttgtgaggcagtactacacactgttaaacaaagcacccacccatcttcacagattctacaaccatcaatcatcattcgttcatggcggattggacccaccaaaccgcgaaaccagccctgtcatcggccaaaagcaaattcatcagaaaattcaacagttgaatttccgggactgtcatgctaaaatcacccaggtcgactctcaggctactcttggcaatggtgtggt

SEQ ID NO: 370 - DNA, 262 bp, Diabrotica virgifera
tgttgaaaatgaacgtttctttaactttcgaagtattgctttacttaaattcctactactttggattattcgccatttgtgagatatgtatgatatccgtaaagtattttagctttattggtttggaccattattctaccgattttggtgtattaataggagtatgtttcatagaaatcttaagagtattactagctagtagagggaatctgacagagagaaaatggccagtcattgtagctattttattaacaattccgtc

SEQ ID NO: 371 - DNA, 272 bp, Diabrotica virgifera
tgaaaaaattggaaaattatatcaaaaaagaagtcgaaattcaacagtggcttaaatattctactcctgaggatgtggaatattatgaatgtcaaatggagttatctcaggatcttttgaagagtttcaacgaggtcgagaggataatagcaaagtacaataagcctgatgggggtaaagattattatattaaatggcaaagtcttccatatgctgaatcgacttgggaagattcagttctaattcaacgaaaatggcctgaccaaataaat

SEQ ID NO: 372 - DNA, 560 bp, Diabrotica virgifera
cagttttttatagaattgtgtccatttcaatcttcgataatgaagaccttatttattatttgctgctttatagcaacttcttggtctgcagtctcagaaaaagcgaaatataccaccaaatatgacaatgttaatttggaggagatagtacacaatgagagactactaaaaaattacgtggattgtttaatggaaaagggaaattgttcaccagatggtttggaactaaaaaaaaatatgcctgacgcaatagagacagattgcagtaaatgcagcgacaagcagaaagaagggtctgaatatattataaggtatttaattgacaacaaacctgaatattggagtcctttgcaggaaaagtatgatccctccgggacttataaacaaagatatcttgaatctaagaaagaggaagttaaggttgaacccattagcaaatcttaggtttcctaacttgtgaaaagaagttgattcgatgttagtatgcattagtagagtattgctttaaacttgtgataaaacctgaaattccattggaagaagttgaaaaagaagtgaaa

SEQ ID NO: 373 - DNA, 838 bp, Diabrotica virgifera
aggaaatcacgtgacactcttactttctttcggtcctttaacacttataagatacacatctcaacttcttccgaaagagttagctttacagacatgaaaagtgtaagtgttttggtgttcgccgccgttttggccgtcgtttatggccagaataaatatactaataaatacgacaatgtggatgttgatatgattttaaaaaatgagagggttttgacaaattatataaaatgtatgatggaggagggaccttgtactgcggaaggaagggagttaaaaaaaacgctccctgacgctcttgcttccggttgcaccaaatgcaacataaaacaaaaagacacggctgagaaggtaatgaaacatcttatgtcaaggaggccgaaagactgggacagacttaccaagaagtatgatccacaaggaaactttaaaaaacgttacgaggaacacttgcaaaaagaaaagaaagcggcttagaaaattatctttaaagaagatgaaaagtcaaacattttgttgtgtttaataattttattgtaatttttttttcacttagaaagttcgtaaaacagtttagatgttatttagtttaaaatataatttgatttgtattgacgaactaaataattatctcgtgaaagtgaataaaaaactttgcaccaattttgcggttacttacaagaagtgtttaacattatttagaaagtgtttcaaattaagcaagactgatgtttaataaaagaaagttgataatcagaatctgaacgatacttgtacttaatattttgtcgacatttacatgtattatggatacattaataaaattatttttagttaa

SEQ ID NO: 374 - DNA, 2365 bp, Diiabrotica virgifera
cggcccgtgcaccactccgtgaaggaaaactctcgtaaaccacgcggaaaactttgggaaactttttcggacaccaacggaaaaatggaactttaagtttgtgccatgtcgatggttttttcggaagaacggagctatcaagatgatatttttgctagaaatcattctaatattaacgtagatacttcagaaaatatgatttccacggagtacctcagcggtatacacagcatcctccaggctcacgccgatgacaacgacgtccacaagaactccgttctggagataaagtccaatgaagctgttattgtgttcaactcttcagttaacactacagagtccgtgtttataccagaactgttttacagacactccatggccatgaccacggtctactgtgtagcatatctgttggtgtttgcacttggactggttggtaatttctttgtgatcgcagtggtgtttcgatcgcccagaatgagaactgttacaaacttttttatcgttaatttagcggtggctgatatattggtaatcgtcttctgcctacctgcaacactgatgtccaatattttcgttccttggatacttggatggttgatgtgcaagactgtaccgtatatacagggtgtgtccgtcgctgcttctgtctacagtttggttgcagtttctttagacagatttcttgcgatatggtggcctctgaagtgccaaatcactaagcgaagggcgaggatcatcatcattttcatctggttcgtcgctttgaccactaccatcccttgggcgattttcttcgacttggtggtcatctttagcgacgctcccaacgtccaactctgcatcgaagtatggcctgaagaaatgaacggatctctgtattttcttactgccaatcttctgttctgctatattttcccgatgattctcatcaccatgtgttacgtcctaatttatattaaggtctggaaacgggatattcccaccgacaccaaagacgctcaaatggaaaagatgcagcaaaaatccaaggtcaaagtggtcaagatgctgatagcagtggtcatattgtttgttatatcttggttaccactttacgccattttcgctaggattaaattaggtggagacatcgaaccatgggaggaagagattctaccgatagctactcccgtggcccaatggttaggagcatccaattcctgtatcaatccgattctttacgcttttttcaataagaaatatagaagaggttttgtagccatcatcaagagcagaaaatgttgcggaagactgagatattacgaaaccgtggctttgatgtcatcgtccactagtatgagaaagtcgtcacacttttacaacaacaactcttcaacaagaaaagtgccgcccgtacaagacaacgcagtctcctacatatacaacaataccggggtctgaaccctgaaacggtccacccccgtttaaaagggcttggttcaacttgtgaccattttgctcaccgttttacgaaagaaatttcgacctagacgtttcggcaacgagtcattgactatgttcatgaaaccaaccaaccaaccaaaaaaatcattgtaccataaatgtattgaatttgtctcgacgtaagaataagagaaaaatttgtagttttaaggaaaccaaggcagaaattttggtatcacagtaccttatttgtaagcttatggcagaaaattgtagtgaccgacactttgaaacagatctaagataatatatctttttaacgatattgtacttcacctgaagcgtgtcttaaaacaaaacttgttgatatcgtagtagatttttgggttttgtgttcatcgtacgagaagcgttgggttaacttacatttgatatatctctatagggtttcagaaatagaaaagtacatataagtaactttctgcttgaaggtttgattaaaaaaatacaaccgactataatatagtctatattttgcccacatatgaatcaaaaacacgtaaatctgaacaaaacaagttatatatttaatgagttatattaggttaattaatatttatgagccaagccgcagatgaattggaaaaaaactagtgtgcaacacaatgttatttttctgatttagaatgtacttaactataagcccgtgcctaatggtacacagcctcaatgcttaatgctcaaaaatgtttgttctcttttggatgacctataactcaaaaagaaattgagtaagtaatgcgaagtagtagtgttcaacctagggggtgaggtatgcttttccaggtgtatagcactctcacatgtctcatctgttttgtttgcttttttatattgtttttttatttttttttataga

SEQ ID NO: 375 - DNA, 1515 bp, Diabrotica virgifera
cactttcatcaccaaacgtcgtatcttctgaatactaccctacacgaggaaagcagatgtactaggagaaaagcagataaaagcctaaaactaagtaacaaaaaagaagaaaacaaaaaggttggtgaaagaagtaatccaccaacattcggtttttggccatgacctatgcagcaactttgctctggtgctaatattctccgccgagtcgacggaggaaaacatcttcagaaacattcaagtatgaaatgaaacaataacagtccaactaaaatggccggggccgtctcgaacaatactactagtgaagacataatcaatgacaatacggtccaagtggcgttttttatgatctacacgaccatattcgtgatgggtatcttcggaaatgtgctagtgtgctacgtcgtgtttcgaaacaaagctatgcagactgtaacaaatctatttattacgaatctagctctatcagacatattactgtgtgttctagctgtcccgttcacccctttatacacgttcctaggggaatgggtattcggtagacttatctgtcatttggtgtcttatgctcaaggaattagtgtttatatatcaaccctgacgttaacgtcaattgctattgatagatactttgtaataatatatccattccatcctaggatgaaactatcaacctgtattataattatagttatcatctggatattttctatgttagtgactcttccctatggagtatatgttaaactcactccggctgaaaagaatgctgaaaagtacttttgtgatgaaaattggcctagtgaagattggagaaggacgttcggaggcataactacagctatgcagttccttattccgtttttaataatggcgttttgttatatctgtgtctctatcaaactaaacgatagagccagatccaaaccaggctctaagaactcgcgaaaagaagaagctgaccgggaaagaaagagaagaactaataggatgctcatagcgatggttgctgtttttttagtttcttggctacctctcaatgctttcaatataattaacgatttctgccagcagatggagaagtggaatttttactatcttacattttttatgacccatgcaatagctatgtcctcgacatgttataatccatttctttacgcttggttgaatgagaactttagaaaagaatttaagcaagttcttccttgttttgatggtgcttcgagacgggtgccagcatgtcgttttgagaactggaggtccgagagaacttgcaacggaaacaacgagactcaacaggaatcactgttaccttcctccggaatacatcgagcactttcattcagagaaagaaaaccaacgcctccccctttgaaaacagatagtgtagagatggaaaatattatggtgccatcagtcaatgcagcagtgtatgactcagcttcagatattgttaggcttaagctaattaccgaagaagaaccccctccttatgaagcgccaaaggct

SEQ ID NO: 376 - DNA, 1199 bp, Diabrotica virgifera
cctgccaactttaattgtgtatggagtcacttttattttaggtcttaccggcaatatccttataattttcacgacgtttcgatatcgacggatgaaaagcgtgaccaacgtttttctttccagtttggcatcatctgatcttattctgatcattgtttgcattccagtaaaggttgccaaattgttttcgtacacgtgggaaatgggagcagttgtatgtaaaggcattcactacatgcagtatgtttctgccatatgttctgtattgacattaaccgcaattagtatagaaaggtattatgcaattgtacatcccatgaaagccaagtacgtttgcactattagtcaagcgaaaaaaattatcttagtaatctggattttggccatatttctcggagcacctacgctgaaggcacagaaccatttaccagttgggaaacgaaatgagtccaattactgtgttagaggatggaacgacaacccggaaatgcataagttccacgaattatacatgttcgtcctcatactggtggtcccgtttttcataatggccttctcatatggacttatttgttgggaaatttccaaagtaatggaaaggaggtctgctatgactggagaattaaaccgtacgtccgaaaaacatatatgccaaaacgccaaattgatcgaaactctccacatgaactcagtcaaacgagccaaaaacgccagagatgacactactatggtgaaacaagtaatctgcatgttggtaacagtggtagtgctttttgcaatctgctggactcccatgttgatcgataatgttctgacagcctatggagtcctaccgtttatgaagtttggaactttaaaatatatgtcaaatgctttctccttaatggcatactttaacagttgcatcaatcccattatttacggattcatgtcgaagagttccagagaaagttttgtccaagccttgtgcttaaagtatgaaagaagaagaatgcacgaaagaaccagcagctacagccttcggcacatgtcggccagaggatcaatgaaaagtgttgttacacgaactacttcgctgaagtgactaatagggactactgtttaacatgctatatgttccagcagtaccaaatattaaattgtacagtaggtgatcaaattattagatattgataaaatgatacaaatgagaagtcaca

SEQ ID NO: 377 - DNA, 1564 bp, Diabrotica virgifera
ttagcatccaatggaccaacgggagccttcgcccccggcatggaaccgaaacgtcaaagaaccgcctacacccgccaccaaatcctagaattagaaaaagaattccactacaaccgatacctgacgaggcgaaggcgcatcgaaatcgctcacacgctagtcctctccgaacgacaaatcaaaatctggttccaaaacagacggatgaagcacaagaaggatcagaagagtaagtctggttccccggatcacaggtcatcaccacttatttcttcgtcttccaccaattccagtcccggttccagatcgagaattcagattaaatcggatgagactgctatagagcgtttgttgaaccactcgatttcttctcagaatcagtacatacctcagactttgccgaattacagttctcctcagtactgctcccagtgggatcgtgaaagacagaactacacaaaccaatacttatccaactgcggatccaacatgtatattgatgctgactctggatattcctacaataatattaactactatccagttaataattatgatcagtataacgaggaagctaccaagccattgtatcagccatatttgaatatcaagaaggagggagctggcgaagaagtcgatcatgaagtctatggacagagagaatttgcaactggtccttccgttaatgtccagtgggaacatcatggccagtgcttgggaaatattagtcctcatgataacttaactccattgtaattggtgtgggaaatgataatggtttattaaaatattgggtttaggtttaaaaatttctcttcaaaatcaaagctaagtaaaccatatgaagcacatatttttttgattttcatttatacttatcttgtgctctttttttgataaattgttagaattgtatcaaaaatatttaaatcatatagatcttttcagttattggataaggaaaatgcatttatcaaattaagaaatatttttgcttcttgtgatataaatacttttacttagctctgacttggcccagatatattttaatataatagacaataagtactatactcaatttaggttttacggacttaacaatcagagttaaagattaatttttgccttttatgttgataatttatgtttagttttttatatttatggatttgaatagagcatatggttcgtagttgtgcctttttaaactcttttataatgagtccaatgtttattaaataaactaaaaattatttatatgtattcaaaagtagcttagatttgtaaatttaattgatattataagagatttaaagaatagctaacttacagatccattgttgtatgaaatccacataaaaggggtgtccaaaaaattttttaataaaatttttcaattcgtagtacaaatagacttttgtaaataaatataaaattcgttattttttttataaatttctacttattttgaatattgcaacgttaagaaattgatgaaatttaagaaatattgcaacgaatgaattaattttttatttaaaaaatatttaaaaaaatatttaaa

SEQ ID NO: 378 - DNA, 1779 bp, Diabrotica virgifera
cgtatagcataggacaagtttgtgtcccgcgtctctataccgaactatcaatgctatattacttctaaccgacaacatacaaaatacggttagagacagtcacgtgtttgcgagtttttaatgtttttcaattgagtgaccgatgaacttcttgttccgggcttcttccgggtccttctgttaggttccggcggatctctgcgacaataccaaaaagtgtttgtgagtgtcggtgtttggtttggttcgctgtgagctagcagattggtcattcggattaaaaacgtacacaaccctataaatttggattaacacttgaccagctaaaatttcggaatacatgaggctcctcttatacgtcggatgaagtaaattgggacatcaggaccaggatagtggacataattaagtgttttaatctaagtgagttaagcggtagtggagatgaaagaatgcagctctagtgatttttaatgtgatttagtgaaaccaaactcggtgtcgaatatttgctgtgattaataaaatttagcatgagttcttactttacaaattacatgccagacatgagaaatggtggtgttgtatcggctgagcatcaacatcagcattacggagccgctgttcaggtggctcaaggtggaggaccagttcaaggcgatccaaactcctgctcaggtgatccctccgtggtgggcctgcgacaaggaatcccgcctcaccactatggcggcccaccggcagcggggcaacctccccaaggaatgccctacccgagatttccaccgtacgacaggatggacatcaggaacgcgggctactacaacgcccagcagcagcagcagatggacggccagtacaggccggatagtccttccagcatgcatatggcaacgaacggacctccaaacggacaccaaacccctgtcgtgtatgctagttgtaaactgcaagcggcagcggtgacgcagaatggggtgttaggccccactggtagtccacccttagatagtgcacaaagcatgaacacccatcatatgggacaccacatgcaagaacaacacccgcaacaccaccagcagccacaccatcagcaacagcaacacatgatgtacggggcgcagcagactgccaacatgcatcagcctcctcagcatcaagctcctctccagcagcaacctcaacccggccagcagccgcccaataatacggcttctgcgttacctagtcctctgtatccttggatgaggagtcaattcgaacgaaaacgaggtcgtcaaacgtacacgaggtaccaaaccttggagttagaaaaggagttccatttcaacaggtacctaacgaggcggagacggatagagatcgctcatgctctctgtctgaccgaaaggcagatcaaaatctggttccaaaaccgaagaatgaagtggaaaaaggagaacaagaccaaaggggaagggggatcggaagggggcggcgatgatattagtcctcagggctcgccgcagtgaaccaagacgtattaaaaaccatgtaccttaatacatatgttagtcattgcatttgccttttgctaccagccaaaggcctttttggaacctcctcagtagggcttcttagaaaatatatctctagatcataccatttgctagatctctaaaaaataatctgttcaaattacaaaaatgattctcataaaacataataaactagcagcaaatccttataaagattatacagggtggtgaattggaaaacgggccatagggggctcaacgt

SEQ ID NO: 379 - DNA, 331 bp, Diabrotica virgifera
cgggtcgtctgtggtgagtacaatggtccaaatggttgtccaagacgacgaggccgacagacatacacccgcttccagaccctagaattagaaaaagaatttcacttcaatcactacctaaccagaaggcgacgcatcgaaatcgcccacgctctctgcctaacggagcgacagataaagatctggttccagaatagacggatgaaacttaaaaaggaactgcgagccgtcaaagaaatcaacgaacaagcgaggagagagcgagaagagcaggaaagacacaaacagcaacagcaagagaagcaacagaagatggatcagaacatccacc

SEQ ID NO: 380 - DNA, 626 bp, Diabrotica virgifera
taggatcagtgtcttgtggagctggtaccaaccccctcgaatggaccggtcaagtgactgtccgcaaaaaacgtaaaccctactcgaaataccagacgctggagttggagaaagagttcctgttcaacgcctacgtttccaaacagaaacgatgggagttggcgcggaacctcaacttgaccgagcgccaggtgaagatttggttccagaaccgaagaatgaaaaataagaagaactcgcaaagacagcaaacgcagcagtcgaataacaataactcggctaccaacaaccagaaccaccacgggtctcatcaccatccctcgcaccaggtgcacacgccgcaccatattgtaaaccaccacgtttctgctaatgggacgttaaaacatcatcagtgaccaatgccgttttctggggtagttttgggccaccatcaccatgggatagcgaattaaaatactcttttagtgtcatttttactgcaagaaagatggaactgtaagctttgattgattttggtgatttttcgtactaatgttactttaattggtagaagtatgcaggacttgtgtacaaatttttgacaattacgtcacattttatataatgatctgtttttcgacacg

SEQ ID NO: 381 - DNA, 1417 bp, Diabrotica virgifera
gtcgtgatttccacccgctgggacagtgaaataacaatgatgacgatggacattactatgtacggtcatcataatcaacacaacgcgccctacaactcttccgaacctaattattataactattccagtgaagtaaaccactcgtcttcccatcatcaattccagaactactattcctccaattaccattatgaagaaccttatttgtacgctacagctccagctgactccgtagaatcaccgtcttcaccgcataatatgaattattacgcacatcagcacgtccaagaaaatcctatcgtgaatacagacagcggactgacttatacgaacctggattacgcaaacactacctcaggctatagccagaacaactacaatgacaactattccagaactcaccccgagctagttcatcataatgaaagttcggaagactcgcaactgcaagctggttatcttcacgaaaacaaatatcaggtggatataaacgatagcaactatttgttaggatcaggagctcagaatgcttgtatggagtttcagcatcttcataggtataaacaagagatgatacccgcagaagagcattcgaggttacgacaacaccacggattgcactcgttaagtcctgcctctatagcgcagcctgttttgcctacgtataaatggatgcaagtgaaaagaaatgttcctaaacctcctgcagccaagcttccaacatcttccatcacagactaccaaagctctccgtcgaataacgtacccctagatgtacagaatccagcctcacgaagctcatgccttggttccaacgcgacgagtcttttaaaccttaattgtttaaatactggcaggacgaacttcaccaataagcaattaacagaactagagaaagaatttcactttaacaaatacctgacgcgggcgcgaaggatcgagatagcttcagcccttcagttaaacgagacgcaagtgaagatatggtttcaaaatagaagaatgaagcagaagaagagaatgaaagagggactgatacctcctgagcctactgttggtacaggaagtaacagtaattctcccacgtctgtcaacgctttacaaaccgagtcagttgctggaagcaacgaaaatagccgcagttgctggaagcaacgaaaatagtcgagaatcgaattgatttggtttagtttttacaaaaggaattgcagtatttcgaaaaattagttgacacgaaaccaaatgttgattgccattttgactttaaaattatttatttaatacctacctaaaccaactaatctgaatcagtatcgttcgtcgtatctttcattataacaatataataaccaatataattacctatcttacacggttactattattggagcaatatcgatattaatcaatatattga

SEQ ID NO: 382 - DNA, 2132 bp, Diabrotica virgifera
caatcgctggttatttctcgcggaaagtctcgctaacattttccgcgaagaaaatcctaacacgcttttccgcgaagaactgtgctgtacgtagtggtggaaaacttgccggcagtgcgttgtgatgttgagtggtgcaaggactcgaggtggtcgatgaaaattaaggatttcggccggatgccgacgggacacctggacgaggaggacttcgtggctgtgaagacgcgctccaacacaccagaaggtgctgcggccggcgggagcggcaatttttggttgtccgcagtgccggccgcagcacaacctctcgaaggttgcaatgaaaccggatttatcaatagtcagccgtcgatggctgaatttatgactgccttacctcacctctctggggagctgcctcacggcccacccatgagccctcaacagactccccctgccggtggttatcctatggacgttccacatggcatgggatcaccgggggtcaacgttcccgagtatccctggatgaaagagaagaaaactactagaaaaaataatcaacaagaaaacggtcttccacggagactcagaacagcctacaccaacacgcaattactagagttagaaaaagaattccacttcaataaatacttgtgtcggccgaggaggattgaaatagcagcgtccttagatctcaccgaacgacaggtgaaagtatggttccaaaatagacgaatgaaacacaaacgacaaacgttaggtaaacagggagaagacggcgacgacaaagactcggtgaccagcgagggtggtaaaagcgctaaactttctgacaaatttctcgaggaagaaatgtcaaaaaagagctgccaaggttgcgagatgcctacagcgggtttgtgtaattcccacgaagaaatgtcagacgtttcatctactagaggcaacaataacaacacacccagtgctacgaacaataataccaactttaataacaacagtaatggtgcaagcagcatcggcagtgcaggtagtttcgataaactgatgaacgaagaagattcgaagaagattcgagatcgaacgaaggtagcggaccacaaacatctccgaggatatccaagaagaactcctcagcagtaccgaacaacgtagtggtgaaaatagagggacgaagaaactcgcccaattcatgtgatagaaaagtaggagtaagaaaaatttccccaagccctagtcatagtaaagacattggtatcggtctaaatgagagtatttccacgaaatcgtcgccgaagagttcatcgggcacgccggggataccgagtggacctctaagtttacctactaacatggtgtaccagcaaattccacgatcatcccctactactgcaacagcaatagcttctgctactgtaacaatccagaatattcctaacgccattccaccgttcgcctctagaggtgcatctagtacacactttcctaatcagtacaacattaacaacagccagcacgactatcggacggacaacagatctaaacactaccagatgtcgcagatgtactctgcagatatgtacaaccaagaacacggcggaatgaatgacgcacatacctaccatcgagggcagaatcatactgggactatgggacatgttaaatataatagcagaaggcaagcttactctggatacgctagccaacagcagtactactataataatcagtctaatgttgaaaagtatacgatgggacagaatagttacaatcaaggttatggtgaacattctggctacaatcattatggttatggctacaataatgagagtaatgaagcagtccaaatgcaaaactctgtccaactaaaccatgaccatactgctaactactatccaacagaagccgtgattccgaaggcgcaaaacccagctgagtaccaaggcaaagttggatattacgaaaacaactacacttcaaaccacatgcctcctgctacaggaggtggtactgaccccgcctatggtatgggtactgaagtctttcctggtactaataatggtaccaccgcaatcatgacgccacctgcgagtgttccgacagaaaacaatgagaattataacaattttcatcagttttatgcgggg

SEQ ID NO: 383 - DNA, 1935 bp, Diabrotica virgifera
ccgctaaaacacacgcgaacggtctgtctgtcactaccacataagtttccacgtgagacacaacttttgaacggtttgtcaaatgatacgcgatgtgctacctcaatctcaccgctactaattcgagatcgtaaaacttgttggacagttttatatcctcagtcacgtgccaacgtttagtgttgtgtttattgctccattagtgttaacaaacaatttattacttcgctgtttagcgcgcattgacgatatgtaattggactttaattacaccaaagtcgtaaacgatgagttcctatcagttcgtgaattctttagcgcaatgctacggacaacaaggacgatccggtgaacaaactcatcaaaaccctactcctggaggtgactattacaaccccaatgcagctgcagcttctagttacccacctgcttgctactctcctccgcaagtaggtccgcaatatcccccgcatccatatgctacaccagcaccaggccatgggcttcagcccacaatgggcgactatactcagctccagccacaacgaattcctggtgctgcaagcacacacatgcaccacgctagtcctggtggccaaagccctggaatgctaaatccttcggctagctgtaagtacgctgattcaacctcctcgacaggggtagcttctccacaagacctaagtactagtggaccgccgactagagctactccgcctctaaatagtacacaaactagtaataattctaacgcgacgattacttcaaaaagttcgggtctaacatctcctttgtcggtcagtacttctcccactggaaaaccgcctacgggatcttcgacagcttcgcaaaatttatcgtcgccagcttcgagcactagctccacctcgagcaacgaaaaatctggatcaaataacaacacgaagagcgggagttcatcgaatccaccacagatctatccttggatgaaaagagttcatcttggacaaagtactgtgaacgccaatggagaaacgaagcgccaaaggacgtcgtacactaggtaccaaactttagagttggagaaagaattccattttaacagatacctgacaaggcggagaagaatcgagatagcccatgctctctgcctaaccgagcgacaaataaaaatatggtttcaaaatcggcggatgaagtggaagaaggaacacaagatggccagtatgaatatcgttccttatcatatgtccccatatggtcacccttatcaatttgatctgcatcctagtcagtttgcccatcttgcaacttaggatgttttttgaatgtgattctgttattatatagattttcacctggcgtctatgcattccaccaggccatggggatgggaggtatgggcagcatgcagcgcggtctctacgcttgcggaagtccctacagctagccctgggccacctataacggagactgcggcccatcttaggccaaattcggatcttggagcagtcttcgggtcgtggtaacgcgatggatcacatggcgggaaatatggaggcagttaattgaaagacaagaaacaagaaactgtattatattctaaatgttaaaagatattcctatgaggaaatcactcaatattagtccattcactcacggtaaaaatttgcaaaacctccaaacttttaaagacaaagaccagcttggactgacattaaatttggcacacatgacctggctaacatgtcaaagaagaaaactgatattgtgctgatgtgtacttgaataccaccacttctcgggtgtgaaaaagcatacgttaaagataagtccgaaagtggataaactgactaagtataaaattttttcaataagtcagtaatcttcgagatatttgcgagtgaatatgttcgtttttcaacaaaaaacatgttttagacggtttttcgcaaa

SEQ ID NO: 384 - DNA, 2137 bp, Diabrotica virgifera
ccgcgataaaactagtaacggtgtgcattccggacccgacattcgcgccgtgtgtttgcctcgtgctcaatattgtcgtaaactgaatttttattgaccatttttattattattgcgtcgtaacaataaccattatttttaatattgaatgacaatttcggcacgttagtgactcatttaatccgcattatgaagatgttatctcgctttagtgacaccagtgcctgacttgaaaaataaacaaaacaccgacattcagtgcttgtgaacttagtgaacttgtgttatttttttaatcgttaaaaggacatccctcagtttttgagggatcattacacatcagccaaaattaacgcgacaataatgaactcctacttcgaacaaagtggtttctacggaggccaccaccaccagggttccggttccgtgacgggagcccatcaccatgaccatcaaagtgcagctgctgcagctgcctacagatcctttcctcttagtctaggtatgtctccatacgcctccagtcaacaccatcacgcacattctcttcaccaagctcgacctccacaagactctccatacgacgcctcggtcgcagcagcttgcaaattatactcatcttcttcagacggccaacagaattcagtaaactacagttcatccacaacaaaatcagactgttcaaaaggcaatgcggatcaaaatggttacgcttcagtggtggcagcagccgctgtaaaagacgtttggcaaagtgctacatccggtgctggtgcaaatctttcaaatagtctcacaggcccagttcgcccggcggcttgtactccagactctagagtcggttacggttcttcagttggactcgttggaggagatccgtcttctagtcccggagcagcgacaggaggaaggacgtcgaactccttatcctcatggaacaacccttgttctttaaactcatcatcatctcagcccgttggtacgcagatccatcaacagacgaatcacacattctacccttggatggcaatagcaggaggtggcgtgctaggtgcaaatggccttcggcgaagaggccgccaaacgtatacgcgataccaaacgctcgagctcgagaaggaattccacacgaaccactaccttacccggcggagacgaatcgaaatggcgcacgcgctctgcctgacggaacgacagatcaaaatctggttccagaacaggcgaatgaagttaaagaaggagatccaagccatcaaagagctcaacgaacaagagaagcaggcgcaggcgcagaaagccgcggcggccgctgcccaagtggtggtggagcagaattagtggctgcaaggggagattcctagggaggagcaacacatcctgcaggcctaaggtgaatattactatttttaattacaaattatagtagaatattcacctaacacacatagtatacttctcgtacgggtgtcaaagcaattaaccacttttcctatcgaaacatgaagattttctgatggagtgagcacttgtttagaatacacaatgtacttgagattttcttcttgtataatataaaaaataacttatttgtacatatttgtagaaattgttttatttagattaggttatagcttatgctcagcagttatgagtcttttctgttatttatacagggtgtatgaaaataagtgggacggtcgattatatcgtaaaacgaacatgtgatcggaaaattgaaaaaaagtaacgaaatgaacatcggatcgaaatactgaagagcatgtgttcaatattattcaaaaatctaccgaatgacaccaaacacaaccccccagccacaccccctatagcgggagagggcagattcatatatcctcataaaaaaataagtaaattttataaggaacattttttctcattgttgatacgtggggctagaatcgtcaaaagtgagtatcatcactataggtaaattatagaaactgtggtaaattatacaatacacttccaaattaaaaacaaaaaacacatttttccatttggaagagtatttctcaagatattagaccatttccataatttttctagggtacaaggataaatcgtttatttttacagattatagcgccatctttcc

SEQ ID NO: 385 - DNA, 1365 bp, Diabrotica virgifera
cgtacatatgtgtttttctcaggtaagagatcccggtgcccggtgttgtagtggtttctcgtctcgaaatctctctctcgagagagagtatcctccgattgtcgacccaccacctattttgcgctaacgccacgagaatgacggtgttggggctcacctaagtgtcctaagtgtcctaagtgattgtttgctgcatatcgcggaagatatgcacactgtgttctgcgtgcctgcctccatctaccttttgctcattatcaccccctacacgacttcctggtgggctgttggcagtcatttggtaatggatccaaaccaaacctgtaagagggcaagatgggcacgcggaaaaatggcagacatatgccacaataaaccaggattattaaatcaaatagccaaaggtatagccctgggtcaaaccgaatgtcagtaccagtttagatatagaagatggaactgtacttccgcaagaagaagcataaaaaaagttatgttaatggacacgagggaaactggttttgtgaacgccatcatcgcagcaggtatcaccttccaagtaacaagggcctgtacgagaggggagcaaatcggttgttcctgttcaaagagaaaacggaggaaaaacaatcgacggaagaatccaccgttgcccgaaggggactgggagtgggacggttgtggggagaacatagaatacggaatgaagaaatccaaagatttcttggataccagatacagaagaagaagtagtgatatgaaaacattagtgaaattacacaattatgtagccggacggttggctgtcaaaaacaacatggtaaccgtctgcaaatgccacggtctctcaggctcctgcacgctgaagacctgcactagaaggatgccatcatttcgagaagtgggtaacagactgaaggaaagattcgatggagcggcaaaagtaatagccggcaacgacggccagagcttcatgcccaagggagagacaatcaagccaccaggtcgaggagatttggtctactcggaagaatcccccgctttctgtattcccaacaacacgctgggctcgtttgggacgcaggggagagtatgcaatgatacttctcaaggagaagaaggctgtggaattttgtgttgcggaaggggctatgcgacgcacacggaagaagttaaagttaattgtaactgtacttttagatattgctgtgaagttcagtgtgatacttgtaaggtaacgaagagagtgaatacttgtttgtgaggagactgtttaatgataagtttagtgagtttaaccagcaaaatttgtttgtaacgttttaggtagctttgtatttagtaaattattatcataaaaaaaaa

SEQ ID NO: 386 - DNA, 7938 bp, Diabrotica virgifera
gtagtgaatcgctttttccgcacccgactcacgcaatcaaaacaattgacatttcgagtgttgacaaacatgcgttcggaggtcgattatttaacgaaccgttttgacgaccagatttagtgtccagtgacgattttgtgatgagatgtgatcagtgacatgccggaaaaagaaccggattttcaaactgcaatgtccgctggacttcctatgcaatttccctcggctttcgctgcttttcacgctcctttgcccgtggaccagaggactcatgaaggacgatatgtctgggaccacaggatgcaacctccaactggagcttttcatccacctgcacctccaagcgttggtggcagtcctggaggcggtttacttcttggaagagagctgcatccagcgtatcggttgcccccacatatggagtacctgtattctcttcaacattccaccactaactcaattcacggattaggcttgagtccagaatatctgagtgcaaggggtcttactgaggtgcatccttcatctaccttaggcagtaccgaattccctttcagtatagatggttccagactcaacagtccgcgtccgggcagcatccgagcttcaagaaaacgagccctctcgtcttccccctattcggattctttcgatatcaactccatgatacgattttctccgaattccctagcctccatcgtcaatggatccaggtcgtcgagtgcaagcggctcctacggccatctatcggcgggagccatcagcccggcattggggatgcatcccatgcaccttcagcagctccaggcgcatttgatgcgcagctctggatcgctactgcctttgcctccggctgctccacctccccacccaatgtattctttgggacaccatcctcttcacgtatcacacaacataaagactgatatattaaatgacagaaagaagtctgaaactagtacaataacccaacttgatatcgattcaacgagttcaagaaggcccaaagtaaaaaaggaaccatctccgaactcttgtggacaagagggacagagtgatcctactgatctcaaagatgaaccaggcgattttatagaaacaaattgtcactggaaagactgttcgactgaattcgggacacaagaagaattagttaagcatatcaacaatgaccatatacacgcaaataagaagtcctttgtatgtcgatgggaaggttgttcaagggcagaaaaaccattcaaagctcaatacatgttggtggttcacatgcggaggcatactggagaaaagcctcataagtgcacgttcgaaggatgtgcaaaagcttactcaagactggaaaacctcaagactcatcttcgatcccatactggcgaaaaaccgtatacttgcgaatatcctggatgcgctaaggcgtttagcaatgcttctgacagggctaagcaccagaataggacacatagtaatgagaaaccgtatgtgtgcaaagcgccaggttgtacaaagcgatacacggatcccagttctcttcgaaaacacgtcaaaactgttcacggggccgaattttacgccagtaagaaacacaaaggatcagagcaaggaccagatgatggccctgctggcttggactccagtccgagaagtgaagacatgcaaagtcataaaacgactagtctcagtagtcccagtatcaaatccgaatctgatgtcaattcccctggccaacaacaaggaagtccacttggagctacgcagcttgcaggtattggcttcaacgatgatcttcctggtgatataggaggaacattaggtccttccgatgacatgccttggacttacgacgcagaggacttggaaattgatgaacttcctgttgtcttaagagccatggtgggcataggaaatgaaaggggcggtgttgctctggcagaaagaacgccacgggtgagaatgaaacacctaacgaaaggaaaaccaaccagcataccttcaatgaccgctcagaggaaaaatatcgccgaccttaatagacgaattaccgacctgaagatggaaggtaacactacaggtccacctcagaccaaaactcaattgacagatattcaacaacgtttgcagccatcaggtggcaatactcaagctcaaattcgtagggacagtaactctacagttagttcgtattatggtagtatgcgaagcgccgatatgagtcgaaagagtagtctcgcatcacaggcatctagcatgagaccaggaattgcaccgggctcgttttatgatcccatttcagctggtagctctagaagatcaagtcaactgtcaaacactgctgcacaaggaggagcttgcattccaccaccaccaccttctcatcttcttgctggacaactacagaagctacagaattcgcctaataccgctaatagcagtaatttagtgctacagacgcagaacgtatcacttcaacaaacagccattcagcaaacctggctttcttctaacctttccaatattgcatcaacgacgacaagtactgatgctcgaagaatgtcagaaccttgtcacactttaacagatagaaagagtccgccaccccggcctgcttcggtgtctttgtcacccctaaagggcactgttaattcgtcagaactgcacccaaatcaagcagttatacttgacgaagtaggagaaggagagatggttgaaaacaaactggttatacccgatgagatggtgagatacttgaatcaagtagctgataatcaaaacgttatgagttggtcagacagtaaccaaaagcctttgggaagtccatcgcaaatgataccatcaccttcaagttttacactaccctctccccaatctggtattagtcaaattctgccctctccgaataacttaaatcaaattatgcactcacctgccaataacttgaatcagatgatgccatctccacctacaaatcaaatgaatcaaatgattaattctccttcatcaaacctaaaccaaatgatacattccccttcatcgaacctaaaccagatgatgcactcacctgctgccactaacattaaccaaatgatgccatcgccggcagccaataacttaaaccaagttatgccttcgcctgctcaaaatatgatgatgccatctccatcagcacccaacttaaatcaaatgatgccatcaccatcagcagctaatttaaatcagatgatgccttctccttcaacaacaaatttaaaccagatgatgccctctccttccgctactaatttaaatcaaatgatgccatctcctgcagcgacaaatctaaaccaaatgatgccatcacctgcatctgttcggaatcaagtaatgcactcgccagcaactaatataactccaatgattcattctccttctggaaatagtatgaaacaaatgatgcattccccggcatctacgaatataaatcagatgattccatctccaaatccaaacatgaatcatgcacctatgtcgaattatgtaccaaacaactacaatatgcaaaataatgctatgcaacaaaatccaatgcctatgaggtgtcactctcaaatgatgaacatgaactgtttcaaccgtcaagttacgcatggaaattgttattctgtacaacattgggaaggttgtagttgtcaaaatattgcacaacaggacaatcatatgtgtcgtcaaatgaatgttcaaaatagctttatgggtaataattcaaaccattactgtaataaccactacgggcaaaatcatcagaaccattacaactgcaacaattatcaaacaagttttaattgcatgccaaatatgtccgaacctatggcttcaccagcgacagctacgcctgcacccactgaaataatgagcccacctcaacaagcacaaatgacgagaccttgctcccattacacacaaaactgttatcccggttcgcaatatcctaatcaatgcattcctaaccaacacaatagctgcaacaactgcaaaaaaccgggttataaccaatgttgtaaccaacaaaatactgagatacaatgcaatgacgttagccaatcgcaaatgtcaccgggtgttccaaataatggtgtaaataatggtacaaatactggtaatcaaactgtcacgttaggtatgcgacaggatgcttacctgagaaccttagaatacgtacaaaattgtcaatcgtgggttaataactcagagactgttagcagtagtactcaccctttaaaagttggtgagaagccgagttcaaacatggtagtaaatgatatgacctcatctcttagctctctgttagaggaaaataggtttttacaaatgattcaatagtttgtaagatttaaggaatatatttgggaatgtgaatacaaaattcgcctatagatatgcaactatgagatgagtttaaaattgttgaaatattttgtactcacattcttgattgctttaagaaatgttaaattggtttgtcttaaataaataaaagtgtttctgtaaacacaataatttgacaaatattttttaaaaaaattgctatatcttcacgatttgttttaaatcttgtgatcttgttttaagaccaacaatggcaacaataatgtaaacagtatgcttcatctcatccgacaaacgatatgttttctaacactttaatacgtctctagctgtactttttgactacctggtaggtataccgtcccaatattctgttcaaaaatatcaacctacctatctcaaatatatttttccgaaattatcattgtcatcattggctctacaacgcatagttggtcttcagctgttagttctcctcactctctaagtgccctagcttccgcagattgtttattttgatggacctaccaatattaggtttactatcgatggttaagctcaaaattatagcgtctacgccagcagtttatgttcaaaagagtctaaacgttcttcattactttttgtcatcatccacgtttctgacgcttaagtgaggacggactcgattagagttctgtatatcaataccttcgttctttttgtgactatgttggatgttaaaagtttctttgatccaaagtatgcccgattggtaagatatatacgtcgctcaatttctgcagttacctacttcattactttggttgatttgtgagcctagatatatgaactctcttactcattcgaaattatatgatccaaccgttagaccttcctttagttacgtgtagccttattctttttgctctaatgacgcaaaaggaatggatctacacgttaatattagtaaaacgaagtctatgaaattttccgaaattatataacaaaattcaatttgaaaagagcctggtcaaattttaaaccctgtaagccgagtgatttttgtattttgatgaataccaaatatataagtagtactaaattaattccaaattaaactaaattaaaagttcaaattcagtcacatcttcaattttttttatttggacatcgctttaaaacagttttcatactgtgtaaacacctactaaaaattgtctacctatagtctagccctagcctttagaataaaactgtgatagaaagacaaattgaatattcatttacttttatttttcttttatctttactaccagatcattatcctctttgattaccgcattcattacttttgatgactgagtaataatatagtctcaagatttttttaaaaatattttctgaatcacatttctgatccgaaaatctacaacttcaattgttggaatcaactttctggtgacaacctaaatccatgccttctaaaatttgcaaggaaaactaacaataaataaagcagactaggggaatctaagattgcattccatttcaatgtttaattagtttgctttatttatcgttagttttcgttgcaaagtttagaaggcacagagtctctgattgtaattttaatgacaatttaatcttaattttgattattagtttaaatccaattttatctaacttttggctaatgtgacaattttgcgcaagtttttgtattttattgatatgcgcacattgttagttacgctttgtctagttttattttttctgaaaaatgtacgacatatcaacgtgggggccatgtttgcgccatcccgtataaaaaggtagaaatgtgtgtgtacgcagcgagctgctacttgattgattgcagaaatcattattatcgacctgtgtagggatctgcatggtagcgtcgcgcgcaggcgtgatatgggaatgtagaccttaataatatccattagaaaattgtatgtacttgtaaccgctaaaaatgtaaccaagtttgtgcttaaaataaatagtgtttgcatccggattttggtaataatacaccctaccagtgcacccatccttccgtcgacgaagttgttcaagggaaccatccatttgacagtccactgcctcaccatttggtcattcgaagccgtatcttttgaacgcatcgccggcaagctttcgccattgtggaattcacgtttgtaaatagttcgaaggttgctaatgaaaggcgtgagtccggattcttgcaacgaggatggcctcacagctctgcaccaatgctgcattgatgataatgaatcaatgttactattattattggagtacggcgctaacgtgaatgcagaggatagcgaaagatggacacccttacacgccgcagctacttgtggtcatttgaaactagtaaggattcttatatcaagaggagccaacttattagctgtgaatgctgacggcaacatgccgtacgatatatgcgaggacgatgcagctctagattacatcgaaacggaaatggcgaaacgcggtgtcactcaagaactcatcgacgacaccagggccgcaacggaaggacaaatgttgatagacttaaagaaagtggcagcagccggtggaaatttggagtattacgatgaacaaggagctacaccattacatattgctgccgccaatggctacctatctgtagtggagtttcttcttgagatgggtgtgagaactgacgtgaaagacaaagacgaatggcagcctagtcatgcagcagcttgttggggtcacccggaagtactagaattattggcacaagcaggagcaaacttaaatgctaagaataaacatgatgaaacaccttcagatatttgtgaagatcctgaaataaaagacagaattctagaactcagaacggagcaggaaataaagaaacaagcagaagctaaacgaaaagttcgaagatctcagagtaacacacgtacacaatccgttaggcggacgtctttgagagataaaggcctgacagcaagaagggacgctgtagaagaagccagattcaggttacaagcggaaagcaatagcatagaagtcattgaaaaaaaggcatcatatccaccaccatcggctactacaacaacgacgacaaccccaccaaaatcaatattaaacaacaatcacctatcagacttaaattcaagtacaatcaacgatgaaaacaaccacatatctccagtcaatagttctcttcatctcatcgaagatacgagatcagccccagaaggaaaagacaacgactcgataggggaagtcgacggctccaaagagaaaacctacaccactgacgtcaacggaaaagtaaccgtccacgtggtagtcaccatcaacgggaatggcactttggccgacctgaagaaacaaaggactcagatacggaacagcagtaatgacgtcagcagtttgacgtctcccgtaggtagtatctcagagaacgaggcaaaccctgacccagagagtgatatcttaaggttgacgggtaacacaactgaagaaaatatggattattccaaaccaaaaagatgttgcgtaataatgtga

SEQ ID NO: 387 - DNA, 4613 bp, Diabrotica virgifera
ctaaacttcattacatttacagtgtgcgagcgaaaccgggaggttacagatcgcatgtcgtttgtcacaactaacgtgatcagttgtttactttcgaaagcatgtttagcatacagcaacggaactgtcgaagtagtttgtttcctagtcgggagttacagatttcgggaactgcttagtgccagtgcatggtgcctccagagggtcagatgtgcagtgtaagaattgccgatgagtgggcctgagtgctaccgctggaatcgtgtgtccgtcgaggatggcctcaatggcgccatcggactcaacgacggagtctacacagaggcacgagtcagatatttacaccagaacaggatgggtagacgcagatatcgccttaggacaattggaccaggggaaagcacaaggcgatcggggaattctgtgggtacgaggtcgaattcagcagcaactttatgtcctagggaggatcctagacacgcatgctgggaaagtcctcttcgtgagtattctagccatctcgaccttcttggtaggtctgaagagcatgaccttccattcagacatcgagttgttatggtcagagccctcaaccatgcccgacactttgcctccagagatgctatccactcatcagatggttcttcagacaggattagatccggacgtggacctcttgaatccccacggcctccttgaacatttagccttagtacagaaagctacgcaagttactgttacaatgtatgatattacctggcgactcaaagacttctgccaatcacctagtattcctaacttcgatctccagtatgtcgagcaaatttttgaaaatatgatgccctgttccattgttacgccgctagattgcttttgggaagggtccaaactactcggacctgaatacccagttcatataccgtatggaataggtaaccaagtaaaatggaccaacctaaatcctagcgagctaatttcccaaataaagttaaaagaatcccaattcgactaccactctttagaagattatttgaagcgtgctggaatcaccacgggataccaggaaaaaccttgccttaaccccaaagatcccgaatgccctgatactgcccctaataagaaccacactcacccaccagatattggagccgagcttaccagtggctgctatggttttgctgctaaatacatgcattggccagaggatctcatagtaggagggattcagaaaaataaaactggtcacataaagaaagccaaagctttacaaactgtcgttcaactaatgggagaccacgaactgtatgagttttggtcagataattataaggtacatcacataagttggagtaaagaaaaagctactacagttttaaatgcatggcaaaaaaagtttgcggacgaaattgaccggttgacgaaaagtaatccggcttcttcatacattttcttcactttttcaacagcaaatgttaacaagttattgaaggaatattctcgcaccgatctgcttaagttggggattgttttggcagtggcttgtatatatggttgggttgctcactcaccaattgcctccataggtgttctagtcttagcaagctctacagcagctgcacttggcgtgtgtagcctgatcgggcttcctatgaaccttttaagtactcaagtgttaccctttataacagtaggactggctatgcgtgaaatgttccttattttatcgactcatactcgaaaactgttacccgcggaagtgttaaaacggacaggacctaatattatatccgcagctcttataaactctggtgcttttgtagctgctgcaattttacccatacccgcgttgagagtgttttgtttacagtgcgcgattatgatcgtgttccatggaacgactcttctcctcatttttcctgcttttttggctctgcagcaaagatgtaaaaaatccgatgttccttgcttcaaatcagacaccaaagtcaaaatggtcaacaataacaataattccgatgtggaacatgggagtaatttattgacaacagaacaagtatgtcaacacaaaaaaggactgatatcttggtgtgtaacaagatacttgactacagtgttattcagatcattcatgaaggtgttaatgagtgttacatatgcggtattaatagttttttgtgtatttaatggattaaaattagaatttgatgtaagactgtccacatttttgccaaaagtgactcaggagtataaatacttagaggcacagaatacttatttcgggttttacaatttttatttggttaccacagaactggaatatccgctgaatcaaccgattttgtatgaatatcattcctctttgactcaagttccttatgttttaaaagattcaaatggtggtctcaatatgaacgacttctggctggcaaattttagagattttctgattgatttgcaacaagaattcgactacaatagaaacagtagttgtctaaatagcgagaagtggttccctaatgccaccgaaaaagcagtattagccaatgccaccgaaaaagcagtattagccttcaaactactctcacagactggagttgtacaatatcctgtagacaagagtcaaatatttaagaaaagactggttcgtaataatattatagatcctaaagctttttacaattatttatcagtatggaatagtaatgatcaaatttcctattcaagctcacaggctaacttaacgcctaaaccatttcagtactatagttccaaagccgaatatgatttaaaaattcctaaatcacaaccacttgtatatacccaaatgccgttttacctcaaaaatttgagaagtacttcaaatgttatcagtgctctcaagcaaatcaaggatatatccgagcaatttaataacagaggcttaaaaaattatccagtaggtcttatatttgcttattataaccagttccttcttattgatcgactactagctgctcaatttgcgttaactcttatttctgctgcaatagtggcatttgttcttgttcagtggataaaactttggtgcgctctattcagtaccttggtgtgtctattattgctttgtctgatgaatgttaatgctctaagtggtactctgggagctcttcactttataataataagtaggaatatatttttgattttaacagggtaccttagtgctatcggtagcagagagcgtagagtaagactatccttagaagtaaacgcagagccaatcctaaaaggggatattggacttttgatatgtgcatcagtattagcaacttctcagtttgaatttatccattaccacatatttatgttgatattactctcggtttgtggatctttggccaattcgttcatattctttccgctgttccttgctttactaggcccaagagctgaattacaacctcttgagcatacagatcgtatctctactcctccaccttctattccttctcctcttcctacaagaaattcatcattttcaaagcctcccaagcgcagtagttcaaataagactacaagagaaccaagtctcaccaccataactgaagaaagttgtaaccagagcattgtagtggaaccacaagttactgttgagtacagcagtcctgaatcaagttcaagtggtccttttactacaaaagtcactgccaccgctaatataaaagtagaattagttgcccctgtatataggtccagtaaatgcaacaataagtgtcaccgatcgtttaagtgtgacaggcggaaaagacaagattcggataaacagaaacagcagtgccggtgctgtaaagactcaaatagtagtgatagtaataccgagactgatcagtgtcctagtagctagcatttcgttaccatttaagcaatcagtgtaaaaatgtttatattgaatatatgtataccacatttatttatttaaagatgaaccatgtataatagcgaactaattttaattaatatatttgtgggtgaatgtggagacatgcacaaattaattaacggataatttattaatgtttatttgccttactatagttccatttttatatcattgttgtaaaagacttttctttgttatataaaattttgggcaagtataatcattaatagaatatcatctcgtctccaaagtgcctgccaaaaatgattcacttttgtaaattacctacatagtctatttacctgatccgtggaatatactcaacaaatattattagatgtaaaatatatagtttatatcaggcaggctcaaatccgttacccttccaatgaagagataattacaatttagtgatttttttaatacaagtatgtgaccaaaaagtatagtaagacattaatgaaaatatctttgtgcaaactgttatatgaatgtgttctaaaaaaatacgttttctattattttacgagaattaaaccaacaaattgatacttgcatattggagataggcgtaatgaaatattaaaatacgtaaatattgtaaattccgttaaattatatggcccctgtatgtgccattttcgattgaaaaattaaacaaacttacaatgaagtaaaaaacttttgtataatg

SEQ ID NO: 388 - DNA, 4169 bp, Diabrotica virgifera
tatggacagtttggcattttgtgatgtgaggatttttgttgaaagtttttttaatggattaatagagaaaatctcaaaagcaattgatgtcatttagaagcttttataatattaacttgaaatatcggaaaacggatacctgtgcgatgccatggaggtccaaaatagcctgtatgcgtctcttcaaatttggttaagagatgaaaataaaaaatgatggaatgcaaataaaaacattagaacatatgtgatgtgaaacataaattagtggtattaaaataaaaggaatgactataaataaatagtgttgatctcaggggctaagattataatactggaaagagactagtaaagtgaatggtagtagtgatagtgcagcatgaaaggaaggggtatgtgataaaagtgcgaaatgatcaaggaaaaagccgaaaagagttcggaaacaacaaaagatgaagctggcagttcagataaagagactgctagcacggaagtgcgagttaaaaaggaagaagagactagtgttaagaaagaaccctgtacaggtcctatcactaaaaatgggggtattgttggttcaacgaatacaggttctttacaaacaacattggatcgaaaacctgaggtgcattcagaggactcattaagtgttccagggcctgattctagtgcgctgcctctcaaagaagaatgtatagatggggagttaggaggagatgcatttggactggggttgcctactactggaggcagttcacattctcagcctccagaaggagtgcaacccctagtaagtaacgtaataaataagcaacccaattctatggaagtaaactacatgcaacaacaaagtcaaatctttgtgttttctacgatattggcaaattcaggtgcagaagaagtgatacaaggtaggtatccttcaataatagcttatcattgtgcccaacctggtacaaaaaagtacttagaaaaaaacccacttaaagtaactcagttcaatcgtcaaaatccagcccagtggctttcaaatatagcaatgatgaaaaacaaaagttgtaccagaagcccagggcttggttcgaaacctccaactaccttggacaattttttgggacctgatcctttagacgatatggtaggtttggatgagacgaacatagcgtgggatacgaaaaataatcatttagaaggtctagatgctgctgtttctaatggattacctgacgtggtgcctgatatggatgcttgcagtccttccttagcaaatgttcagccctcattgcagggtgtcaaagtgcctgacgagaatctcactccccaacagcgccaacacagagaagtacaattggctacaataagaaaaatgcaacaaatgctctttcctgaaagtcaaagtatggaaggagttccagggggtgccgctggtggaaatgcccctggagcaggaagtaatgtaccagctgactcaaatcttcctcctggtgcaacacctcctagtgggcagttggaatggcagaagttacatcaattttatgatgacccaaaaagaaaacaaggtcctggttctgtagttgcagtgggtccagtaagtggtggtagtactggtccgaacatgccagcgggaagtgggggaccagcagtgatgcctcgaggtgttcctggaccaggaccaagattacaaggacctccccctccttatcatcaaacacctcggtctgccagtgttcccatagctttacaaagtccaaatcctacatctccaaataatccaacatcaaatttatcactaccttcacctagagcctcgtcagctctaaattcacctgcggatcctaataggccttttggattaagtaggcatatgagtactggacaaagccctacctcacaagactctccctctgcaccaagacttaatcatagtaatcctagtacaccattatcgtcacatcacctatctcccagtgtaacatcaactgaaccaacatcaacccatcagtctacagctgatggaatgtttggcaggaccttacaatctatggcacagcaaaagcaacatattagtacttcaacgacctcatgtgcaacaacaccaacaacgggtgttgttaaagaaccaaatcttatgcctgtaccttcacctcagcaaatacagtacctcaatacttttgagggacaagaactgataatccagaaacagccaaataccagcttaaaagaaggaaatatcatatcacctccggttttgcccactacaatggacagcggttttccagttacgtcagatcttccacattcgagagtttcaggttcaaacacgcctacgtcgatggatgtaggacctaggtttcctcccaccccctctgagggttgtcgcttccaaatacccagccctcatacgcctactgccgtaactgcaggtgaaaaaccgccccagcgacttcctggagcttcagtgttaagtccacaaacagttcctggtccaaattcggaccctctgaaaacagacctatttccaactcctagcccgcacatgatggatgttcccagatttccaggaccaaatgcttctccaggtgctaaaatgggaggaggtttcgtcaatttatcaccccaagcaaaaccgttagatatgcctaattacgcatgtgttagaggagacaatgttcctttaaatccaaactgtacaagtaccatgtccggcaatccaaaggtttcacattttgacccgatctcatcgttagcacaaatgagtcaacagttaacaaatagtgtagcaagttccctgaatggacagagcaatcaaggtcctccaatgatgaattttggttctccttcgatgcacatgatggatatgggtggatgccatggtatgaacgaaatggatcaaggttcgggtggtatgatgggtatgcctatgcaaggtcctccccatggatttcatccgaattcaccaatgggtcctatacgctccctttcgcctaaactgccaggtgcctttccaaatcatatgcctatgcctagaatgataggacgtcccccaggaccaaatccttataatggagcaaatgtccaagtcaagcctaacgcaccaaacacgatacaatatttaccagcaaaatctcaggtggggcaagctcctccacctagaggaccaccaattgtggatttcttaacacgtatcacaactcctatgaatatgatggacgcaaaaatgcaaccacagaatatgcaatatttctcctcttgtggtcctaacaatggccctatgcaaggaggtcccatgcctccacatatgggacacatggaagggcccatgtctcaagacggtcctatcggaccaatgagtatgggtagtcatatgggaaatggaccaggccctatgggtggcaacatgggaatgcccgctggaatgatacccatgatgcgaggtcctatgaggcccccaatgggtatgagaatgccacaaatggtttttaacggaccccctggaggagcggaacctatgtttaatcctggcccgaacatgggtaatccctcaccacagatgtttgttagcggtcctaagggcagtccgatgggcctcggagccccagatgccagtcaacctcttcctccttcgatgggacaaaacaatagctttaaaaattcaccttttgtctgtcctacaactgctgaccccaactatgcacaacagttccacaacttccagcaacagctgtatgccactggcactcgtagtcaaatgggtggacaagccatgggaccaggcccaggtccaccacatatgcaacagcctccttactacaatcccaaatagcaaatatggtgctgagtgtgtgagtcagagtattttgttttatttttgatattactaatgagtaatccggcaataataaaatgtgagattaagttgtatatttagtgttacgcatcgaattcaagtgcagttaaaggtcatgtaaaaagtcgcctgcctgaggctcagttcgcctaaatacttaatgctattttggtttgtatattcgccataaataaactagacataaactagaaagtaattattaatattaagtgttggactttcttagtccttttaaagacggaggtttcactattgctcattaatttgtttatcctgttattcgtttattgtacatttt

SEQ ID NO: 389 - DNA, 1920 bp, Diabrotica virgifera
ttttttagtttgtgtgaacctgttgtagagttaggagaattggtatataggtatatcagagagtgaagatacccgaaagtcatcgtcagagaagaaagaacgaaaaagagcagcgtaccacctgtagtcctctcagcggtaccatctaccatcccggcatgatttgcgacctgaggcattcttcttcgagccactccctctcaccaatcgcggcggaggtaccagaagatggccaggacgcgctcagagtggggctgacgtaacttcaagtcgaatcggtactgtagtcaccgaaggtgcaaatccaatgcaaggataatctgggaaagatgcacaagtactgcactcagtactttttggcacttgtcgcgtctcggccgatgattagctgatagtggtgcggaaacggatagtactctggaacgatgaggtggtgcgtggtgttcctcttgggagttttcgcggtggtggaagcgtgcgggcctggacgcggagtgggacgccggcggggctccaggaaacttacccctttggtcttcaagcaacacgttccgaatgtgccggagagtacgctaacggccagtggggttcccgagggaaggattgataggaacgatacgaggtttaacgatttagtgcccaactacaacgacgacattatcttcaaggatgaggagggaacgggtgctgatcggttaatgacccagagatgcaaagaaaaactcaacaccctcgccatctcggtgatgaacatgtggcctggcgtgaagctcctcgtgacggagggctgggacgaagaggggtaccacactcccgactcgttgcactacgagggtcgggccgtagatatcactacctccgacagggaccggtctaagtacggaatgctcgccaggttggccgtcgaagcgggcttcgactgggtctactacgagagtaggtcccacatacactgctcagttaagttagaatcatcacaaggtgcaaaatatggaggatgtttttctggcgacagtacagtattgacctctactggcgtacgaaggaaactctccgagctccaaataggcgagaagatcctggctcaagatacctccagcaacgagctcatcttcagcgaagtgctcctctacttagactataacccttcccagaagagggagttcctaaaacttaccctctcctctaacagaactttaatcataactcctagccacctggtgctcaaagaaaccctcgaagggtacagaacagtcttcgcaaaaagcatcagtgtgggtgataaacttttagtatcaaataattcgcatagtgtagttacagacagtgttattgaagtgagtggggttgtgaggacaggagtgtacgctcccttaacggcagcggggactttagtggtaaacgacgtcgtggcgtcgtgttacgccatcatggacagtcaagcaattgcccattgggcattcctgccagtgcggttgggctggaatctcaagcaagccactttgagggtgtggagtgtgatcagtagacctttccgcgtgtggtcccaagacagcgcggctgtacgaaagatcagcgaaccgggtgtgcattggtaccccagaatgctgtacacggtggcccagtacttaatgccctctcatatgactgggtgatcctgaaaaaagttgtggttttgttggccagtgaatttgtatatttatctatttattactttttttatacatttttgttaattttatcttctgaactgcaagttgtatatttgtacagtattttttgggtgttgtgatgccacatctagtctacgtttttgccagttttttatataattgaaaaaataaacgtaaaaattcttttatttaactatttgtatgactaaaatgtaatagttttactaaaatattgtttattatttta

SEQ ID NO: 390 - DNA, 405 bp, Diabrotica virgifera
atgaagaccttatttattatttgctgctttatagcaacttcttggtctgcagtctcagaaaaagcgaaatataccaccaaatatgacaatgttaatttggaggagatagtacacaatgagagactactaaaaaattacgtggattgtttaatggaaaagggaaattgttcaccagatggtttggaactaaaaaaaaatatgcctgacgcaatagagacagattgcagtaaatgcagcgacaagcagaaagaagggtctgaatatattataaggtatttaattgacaacaaacctgaatattggagtcctttgcaggaaaagtatgatccctccgggacttataaacaaagatatcttgaatctaagaaagaggaagttaaggttgaacccattagcaaatcttag

SEQ ID NO: 391 - DNA, 384 bp, Diabrotica virgifera
atgaaaagtgtaagtgttttggtgttcgccgccgttttggccgtcgtttatggccagaataaatatactaataaatacgacaatgtggatgttgatatgattttaaaaaatgagagggttttgacaaattatataaaatgtatgatggaggagggaccttgtactgcggaaggaagggagttaaaaaaaacgctccctgacgctcttgcttccggttgcaccaaatgcaacataaaacaaaaagacacggctgagaaggtaatgaaacatcttatgtcaaggaggccgaaagactgggacagacttaccaagaagtatgatccacaaggaaactttaaaaaacgttacgaggaacacttgcaaaaagaaaagaaagcggcttag

SEQ ID NO: 392 - DNA, 499 bp, Diabrotica virgifera
tgtcgatggttttttcggaagaacggagctatcaagatgatatttttgctagaaatcattctaatattaacgtagatacttcagaaaatatgatttccacggagtacctcagcggtatacacagcatcctccaggctcacgccgatgacaacgacgtccacaagaactccgttctggagataaagtccaatgaagctgttattgtgttcaactcttcagttaacactacagagtccgtgtttataccagaactgttttacagacactccatggccatgaccacggtctactgtgtagcatatctgttggtgtttgcacttggactggttggtaatttctttgtgatcgcagtggtgtttcgatcgcccagaatgagaactgttacaaacttttttatcgttaatttagcggtggctgatatattggtaatcgtcttctgcctacctgcaacactgatgtccaatattttcgttccttggatacttggatggttgatgtg

SEQ ID NO: 393 - DNA, 499 bp, Diabrotica virgifera
tggccggggccgtctcgaacaatactactagtgaagacataatcaatgacaatacggtccaagtggcgttttttatgatctacacgaccatattcgtgatgggtatcttcggaaatgtgctagtgtgctacgtcgtgtttcgaaacaaagctatgcagactgtaacaaatctatttattacgaatctagctctatcagacatattactgtgtgttctagctgtcccgttcacccctttatacacgttcctaggggaatgggtattcggtagacttatctgtcatttggtgtcttatgctcaaggaattagtgtttatatatcaaccctgacgttaacgtcaattgctattgatagatactttgtaataatatatccattccatcctaggatgaaactatcaacctgtattataattatagttatcatctggatattttctatgttagtgactcttccctatggagtatatgttaaactcactccggctgaaaagaatgc

SEQ ID NO: 394 - DNA, 500 bp, Diabrotica virgifera
tgaaaagcgtgaccaacgtttttctttccagtttggcatcatctgatcttattctgatcattgtttgcattccagtaaaggttgccaaattgttttcgtacacgtgggaaatgggagcagttgtatgtaaaggcattcactacatgcagtatgtttctgccatatgttctgtattgacattaaccgcaattagtatagaaaggtattatgcaattgtacatcccatgaaagccaagtacgtttgcactattagtcaagcgaaaaaaattatcttagtaatctggattttggccatatttctcggagcacctacgctgaaggcacagaaccatttaccagttgggaaacgaaatgagtccaattactgtgttagaggatggaacgacaacccggaaatgcataagttccacgaattatacatgttcgtcctcatactggtggtcccgtttttcataatggccttctcatatggacttatttgttgggaaatttccaaagta

SEQ ID NO: 395 - DNA, 588 bp, Diabrotica virgifera
gaacgacaaatcaaaatctggttccaaaacagacggatgaagcacaagaaggatcagaagagtaagtctggttccccggatcacaggtcatcaccacttatttcttcgtcttccaccaattccagtcccggttccagatcgagaattcagattaaatcggatgagactgctatagagcgtttgttgaaccactcgatttcttctcagaatcagtacatacctcagactttgccgaattacagttctcctcagtactgctcccagtgggatcgtgaaagacagaactacacaaaccaatacttatccaactgcggatccaacatgtatattgatgctgactctggatattcctacaataatattaactactatccagttaataattatgatcagtataacgaggaagctaccaagccattgtatcagccatatttgaatatcaagaaggagggagctggcgaagaagtcgatcatgaagtctatggacagagagaatttgcaactggtccttccgttaatgtccagtgggaacatcatggccagtgcttgggaaatattagtcctcatgataacttaactccattgtaa

SEQ ID NO: 396 - DNA, 360 bp, Diabrotica virgifera
ccgagatttccaccgtacgacaggatggacatcaggaacgcgggctactacaacgcccagcagcagcagcagatggacggccagtacaggccggatagtccttccagcatgcatatggcaacgaacggacctccaaacggacaccaaacccctgtcgtgtatgctagttgtaaactgcaagcggcagcggtgacgcagaatggggtgttaggccccactggtagtccacccttagatagtgcacaaagcatgaacacccatcatatgggacaccacatgcaagaacaacacccgcaacaccaccagcagccacaccatcagcaacagcaacacatgatgtacggggcgcagcagactgcc

SEQ ID NO: 397 - DNA, 331 bp, Diabrotica virgifera; identical to SEQ ID NO: 379

SEQ ID NO: 398 - DNA, 398 bp, Diabrotica virgifera
taggatcagtgtcttgtggagctggtaccaaccccctcgaatggaccggtcaagtgactgtccgcaaaaaacgtaaaccctactcgaaataccagacgctggagttggagaaagagttcctgttcaacgcctacgtttccaaacagaaacgatgggagttggcgcggaacctcaacttgaccgagcgccaggtgaagatttggttccagaaccgaagaatgaaaaataagaagaactcgcaaagacagcaaacgcagcagtcgaataacaataactcggctaccaacaaccagaaccaccacgggtctcatcaccatccctcgcaccaggtgcacacgccgcaccatattgtaaaccaccacgtttctgctaatgggacgttaaaacatcatcagtga

SEQ ID NO: 399 - DNA, 328 bp, Diabrotica virgifera
taattgtttaaatactggcaggacgaacttcaccaataagcaattaacagaactagagaaagaatttcactttaacaaatacctgacgcgggcgcgaaggatcgagatagcttcagcccttcagttaaacgagacgcaagtgaagatatggtttcaaaatagaagaatgaagcagaagaagagaatgaaagagggactgatacctcctgagcctactgttggtacaggaagtaacagtaattctcccacgtctgtcaacgctttacaaaccgagtcagttgctggaagcaacgaaaatagccgcagttgctggaagcaacgaaaatag

SEQ ID NO: 400 - DNA, 319 bp, Diabrotica virgifera
tgaaaattaaggatttcggccggatgccgacgggacacctggacgaggaggacttcgtggctgtgaagacgcgctccaacacaccagaaggtgctgcggccggcgggagcggcaatttttggttgtccgcagtgccggccgcagcacaacctctcgaaggttgcaatgaaaccggatttatcaatagtcagccgtcgatggctgaatttatgactgccttacctcacctctctggggagctgcctcacggcccacccatgagccctcaacagactccccctgccggtggttatcctatggacgttccacatggcatggg

SEQ ID NO: 401 - DNA, 438 bp, Diabrotica virgifera
tgagttcctatcagttcgtgaattctttagcgcaatgctacggacaacaaggacgatccggtgaacaaactcatcaaaaccctactcctggaggtgactattacaaccccaatgcagctgcagcttctagttacccacctgcttgctactctcctccgcaagtaggtccgcaatatcccccgcatccatatgctacaccagcaccaggccatgggcttcagcccacaatgggcgactatactcagctccagccacaacgaattcctggtgctgcaagcacacacatgcaccacgctagtcctggtggccaaagccctggaatgctaaatccttcggctagctgtaagtacgctgattcaacctcctcgacaggggtagcttctccacaagacctaagtactagtggaccgccgactagagctactccgcctctaaata

SEQ ID NO: 402 - DNA, 356 bp, Diabrotica virgifera
tgaactcctacttcgaacaaagtggtttctacggaggccaccaccaccagggttccggttccgtgacgggagcccatcaccatgaccatcaaagtgcagctgctgcagctgcctacagatcctttcctcttagtctaggtatgtctccatacgcctccagtcaacaccatcacgcacattctcttcaccaagctcgacctccacaagactctccatacgacgcctcggtcgcagcagcttgcaaattatactcatcttcttcagacggccaacagaattcagtaaactacagttcatccacaacaaaatcagactgttcaaaaggcaatgcggatcaaaatggttacgcttcagtg

SEQ ID NO: 403 - DNA, 381 bp, Diabrotica Frag1
atgcacactgtgttctgcgtgcctgcctccatctaccttttgctcattatcaccccctacacgacttcctggtgggctgttggcagtcatttggtaatggatccaaaccaaacctgtaagagggcaagatgggcacgcggaaaaatggcagacatatgccacaataaaccaggattattaaatcaaatagccaaaggtatagccctgggtcaaaccgaatgtcagtaccagtttagatatagaagatggaactgtacttccgcaagaagaagcataaaaaaagttatgttaatggacacgagggaaactggttttgtgaacgccatcatcgcagcaggtatcaccttccaagtaacaagggcctgtacgagaggggagcaa

SEQ ID NO: 404 - DNA, 434 bp, Diabrotica virgifera
tatgtgtgcaaagcgccaggttgtacaaagcgatacacggatcccagttctcttcgaaaacacgtcaaaactgttcacggggccgaattttacgccagtaagaaacacaaaggatcagagcaaggaccagatgatggccctgctggcttggactccagtccgagaagtgaagacatgcaaagtcataaaacgactagtctcagtagtcccagtatcaaatccgaatctgatgtcaattcccctggccaacaacaaggaagtccacttggagctacgcagcttgcaggtattggcttcaacgatgatcttcctggtgatataggaggaacattaggtccttccgatgacatgccttggacttacgacgcagaggacttggaaattgatgaacttcctgttgtcttaagagccatggtgggcataggaaatgaaag

SEQ ID NO: 405 - DNA, 388 bp, Diabrotica virgifera
tggcctcaatggcgccatcggactcaacgacggagtctacacagaggcacgagtcagatatttacaccagaacaggatgggtagacgcagatatcgccttaggacaattggaccaggggaaagcacaaggcgatcggggaattctgtgggtacgaggtcgaattcagcagcaactttatgtcctagggaggatcctagacacgcatgctgggaaagtcctcttcgtgagtattctagccatctcgaccttcttggtaggtctgaagagcatgaccttccattcagacatcgagttgttatggtcagagccctcaaccatgcccgacactttgcctccagagatgctatccactcatcagatggttcttcagacaggattagatccgga

SEQ ID NO: 406 - DNA, 523 bp, Diabrotica virgifera
aaacctccaactaccttggacaattttttgggacctgatcctttagacgatatggtaggtttggatgagacgaacatagcgtgggatacgaaaaataatcatttagaaggtctagatgctgctgtttctaatggattacctgacgtggtgcctgatatggatgcttgcagtccttccttagcaaatgttcagccctcattgcagggtgtcaaagtgcctgacgagaatctcactccccaacagcgccaacacagagaagtacaattggctacaataagaaaaatgcaacaaatgctctttcctgaaagtcaaagtatggaaggagttccagggggtgccgctggtggaaatgcccctggagcaggaagtaatgtaccagctgactcaaatcttcctcctggtgcaacacctcctagtgggcagttggaatggcagaagttacatcaattttatgatgacccaaaaagaaaacaaggtcctggttctgtagttgcagtgggtccagtaagtggtggtagtactg

SEQ ID NO: 407 - DNA, 630 bp, Diabrotica virgifera
tgaggtggtgcgtggtgttcctcttgggagttttcgcggtggtggaagcgtgcgggcctggacgcggagtgggacgccggcggggctccaggaaacttacccctttggtcttcaagcaacacgttccgaatgtgccggagagtacgctaacggccagtggggttcccgagggaaggattgataggaacgatacgaggtttaacgatttagtgcccaactacaacgacgacattatcttcaaggatgaggagggaacgggtgctgatcggttaatgacccagagatgcaaagaaaaactcaacaccctcgccatctcggtgatgaacatgtggcctggcgtgaagctcctcgtgacggagggctgggacgaagaggggtaccacactcccgactcgttgcactacgagggtcgggccgtagatatcactacctccgacagggaccggtctaagtacggaatgctcgccaggttggccgtcgaagcgggcttcgactgggtctactacgagagtaggtcccacatacactgctcagttaagttagaatcatcacaaggtgcaaaatatggaggatgtttttctggcgacagtacagtattgacctctactggcgtacgaaggaaactctccg
